(19) United States
(12) Patent Application Publication
(10) Pub. No.: US 2013/0266579 A1
(43) Pub. Date: Oct. 10, 2013

(54) Conditionally active anti-epidermal growth factor receptor antibodies and methods of use thereof

(71) Applicants: Ge Wei, San Diego, CA (US); Gregory I. Frost, Del Mar, CA (US); Lei Huang, San Diego, CA (US); H. Michael Shepard, San Diego, CA (US); Daniel Edward Vaughn, Encinitas, CA (US)

(72) Inventors: Ge Wei, San Diego, CA (US); Gregory I. Frost, Del Mar, CA (US); Lei Huang, San Diego, CA (US); H. Michael Shepard, San Diego, CA (US); Daniel Edward Vaughn, Encinitas, CA (US)

(21) Appl. No.: 13/815,553

(22) Filed: Mar. 8, 2013

Related U.S. Application Data
(60) Provisional application No. 61/685,089, filed on Mar. 8, 2012.

(51) Int. Cl. C07K 16/28

(52) U.S. Cl. CPC C07K 16/2863
USPC 424/158.1; 435/69.6; 435/334; 435/320.1; 530/387.3; 530/389.2; 530/391.1; 530/391.5; 530/391.9; 536/23.1

(57) ABSTRACT

Provided herein are modified anti-EGFR antibodies and nucleic acid molecules encoding modified anti-EGFR antibodies. Also provided are methods of treatment and uses using modified anti-EGFR antibodies.

### RELATED APPLICATIONS

[0001] Benefit of priority is claimed to U.S. Provisional Application Ser. No. 61/685,089, entitled “Conditionally Active Anti-Epidermal Growth Factor Receptor Antibodies and Methods of Use Thereof” filed on Mar. 8, 2012.

[0002] This application is related to International PCT Application No. (Attorney Dkt. No. 33320.03104.WO02/3104PC), filed the same day herewith, entitled “Conditionally Active Anti-Epidermal Growth Factor Receptor Antibodies and Methods of Use Thereof,” which claims priority to U.S. Provisional Application Ser. No. 61/685,089.

[0003] This application also is related to U.S. application Ser. No. 13/200,666, filed on Sep. 27, 2011, to Lalitha Kodandapani, Louis Howard Bookbinder, Gregory I. Frost, Philip Lee Sheridan, Harold Michael Shepard, Ge Wei and Lei Huang, entitled “METHODS FOR ASSESSING AND IDENTIFYING OR EVOLVING CONDITIONALLY ACTIVE THERAPEUTIC PROTEINS,” which is a continuation-in-part of International Application No. PCT/US11/50891, filed on Sep. 8, 2011, to Lalitha Kodandapani, Louis Howard Bookbinder, Gregory I. Frost, Philip Lee Sheridan, Harold Michael Shepard, Ge Wei and Lei Huang, entitled “METHODS FOR ASSESSING AND IDENTIFYING OR EVOLVING CONDITIONALLY ACTIVE THERAPEUTIC PROTEINS,” which claims priority to U.S. Provisional Application Ser. No. 61/402,979, entitled “METHODS FOR ASSESSING AND IDENTIFYING OR EVOLVING CONDITIONALLY ACTIVE THERAPEUTIC PROTEINS AND CONDITIONALLY ACTIVE THERAPEUTIC PROTEINS,” filed on Sep. 8, 2010, to Lalitha Kodandapani, Philip Lee Sheridan, Harold Michael Shepard, Louis H. Bookbinder and Gregory I. Frost.

[0004] The subject matter of each of the above-noted applications is incorporated by reference in its entirety.

### INCORPORATION BY REFERENCE OF SEQUENCE LISTING PROVIDED ON COMPACT DISCS

[0005] An electronic version on compact disc (CD-R) of the Sequence Listing is filed herewith in duplicate (labeled Copy #1 and Copy #2), the contents of which are incorporated by reference in their entirety. The computer-readable file on each of the aforementioned compact discs, created on Mar. 8, 2013 is identical, 1237 kilobytes in size, and titled 3104SEQ.001.txt.

### FIELD OF THE INVENTION

[0006] Provided herein are conditionally active anti-EGFR antibodies, including modified anti-EGFR antibodies, and nucleic acid molecules encoding conditionally active anti-EGFR antibodies, including modified anti-EGFR antibodies. Also provided are methods of treatment using the conditionally active anti-EGFR antibodies.

### BACKGROUND

[0007] Anti-EGFR antibodies are used in the clinical setting to treat and diagnose human diseases, for example cancer. For example, exemplary therapeutic antibodies include Cetuximab. Cetuximab is approved for the treatment of recurrent or metastatic head and neck cancer, colorectal cancer and other diseases and conditions. It can also be used in the treatment of other diseases or conditions involving overexpression of EGFR or aberrant signaling or activation of EGFR. Administered anti-EGFR antibodies can bind to EGFR in healthy cells and tissue. This limits the dosages that can be administered. Hence, cetuximab and other anti-EGFR antibodies exhibit limitations when administered to patients. Accordingly, it is among the objects herein to provide improved anti-EGFR antibodies.

### SUMMARY

[0008] Provided are conditionally active anti-epidermal growth factor receptor (EGFR) antibodies and antigen binding fragments thereof. The antibodies and fragments thereof are conditionally active such that they exhibit greater activity in a target tissue, such as a tumor microenvironment, which has an acidic pH, than in non-target tissues, such as non-tumor tissue environment, such as that, which occurs in the basal layer of the skin, which has neutral pH around 7-7.2. Generally anti-EGFR antibodies that are employed as anti-tumor therapeutics bind to EGFR receptors and inhibit EGFR-mediated activities that occur upon binding of a ligand therefor. As a result, they can inhibit or treat tumors. Because tissues, other than tumors, such as tissues in the skin express EGFRs, the anti-EGFR antibodies inhibit activities of these receptors, thereby causing undesirable side-effects. The antibodies provided herein are conditionally active in that they exhibit reduced activity at non-tumor microenvironments (e.g. having a neutral pH) compared to antibodies that are not conditionally active and/or compared to their activity in the tumor microenvironment. By virtue of the selectivity to a tumor microenvironment, they exhibit fewer or lesser undesirable side-effects and/or exhibit improved efficacy by virtue of the ability to dose higher.

[0009] Provided herein are an anti-EGFR antibody, or antigen-binding fragment thereof, that is conditionally active under conditions in a tumor microenvironment. wherein the anti-EGFR antibody, or antigen-binding fragment thereof, exhibits a ratio of binding activity to human epidermal growth factor receptor (EGFR) or a soluble fragment thereof under conditions in a tumor environment compared to under conditions in a non-tumor environment of at least 3.0. In such an example, the conditions in a tumor environment contain one or both of pH between or about between 5.6 to 6.8 or lactate concentration between or about between 5 mM to 20 mM, and protein concentration of 10 mg/mL to 50 mg/mL; and the conditions in a non-tumor environment contain one or both of pH between or about between 7.0 to 7.8 or lactate concentration between or about between 0.5 mM to 5 mM, and protein concentration of 10 mg/mL to 50 mg/mL. For example, the anti-EGFR antibody, or antigen-binding fragment thereof, exhibits the ratio of activity under conditions that exist in a tumor microenvironment that contain a pH of between or about between 5.6 to 6.8 compared to under conditions that exist in a non-tumor microenvironment that comprise a pH of between or about between 7.0 to 7.8. In another example, the anti-EGFR antibody, or antigen-binding fragment thereof, exhibits the ratio of activity under conditions that exist in a tumor microenvironment that contain a pH of between or about between 6.0 to 6.5 compared to under conditions that exist in a non-tumor microenvironment that comprise a pH of about 7.4. In some instances, the anti-EGFR antibody, or antigen-binding fragment thereof, exhibits the ratio of activity under conditions that exist in a tumor microenvironment that contain lactate concentration between or about between 5 mM to 20 mM compared to under conditions that exist in a non-tumor microenvironment that contain lactate concentration between or about between 0.5 mM to 5 mM. In particular examples herein,

the anti-EGFR antibody or, or antigen-binding fragment thereof, of any of claims 1-4, exhibits the ratio of activity under conditions of a tumor microenvironment that contain pH of 6.0 to 6.5 and lactate concentration of 10 mM to 20 mM compared to under condition of a non-tumor microenvironment that contain pH of 7.0 to 7.4, inclusive, and lactate concentration of 0.5 mM to 2 mM.

[0010] In any of such examples, the ratio of binding activity is present or exists in the presence of a protein concentration between or about between 10 mg/mL to 50 mg/mL, wherein the protein concentration under conditions in a tumor microenvironment and under conditions in a non-tumor microenvironment is substantially the same or is the same. For example, the protein concentration is at least 12 mg/mL, 15 mg/mL, 20 mg/mL, 25 mg/mL, 30 mg/mL, 35 mg/mL, 40 mg/mL, 45 mg/mL or 50 mg/mL. The protein can be serum albumin, such as human serum albumin. In the protein is provided in serum, such as human serum. For example, the concentration of serum is 20% (vol/vol) to 90% (vol/vol), 20% (vol/vol) to 50% (vol/vol) or 20% (vol/vol) to 40% (vol/vol), for example it is less than 90% (vol/vol) and is about or is at least or is 20% (vol/vol), 25% (vol/vol), 30% (vol/vol), 35% (vol/vol), 40% (vol/vol), 45% (vol/vol) or 50% (vol/vol). In particular example, the ratio of activity is present under conditions containing a serum concentration, such as human serum concentration that is or is about 25% (vol/vol).

[0011] In any of the above examples of modified anti-EGFR antibody, or antigen-binding fragment thereof, provided herein, the ratio of binding activity is the ratio of activity under the conditions in a tumor microenvironment compared to under conditions in a non-tumor microenvironment as determined in any assay capable of measuring or assessing binding activity to human EGFR, or to a soluble fragment thereof. For example, binding activity is determined in vitro in a solid-phase binding assay. The solid-phase binding assay can be an immunoassay, such as an enzyme-linked immunosorbent assay (ELISA). In such examples, the binding activity is a spectrophotometric measurement of binding, and the ratio of binding activity is the ratio of the spectrophotometric measurement for binding under conditions that exist in a tumor microenvironment compared to under conditions that exist in a non-tumor microenvironment at the same concentration of antibody, such as a concentration of antibody that is between or about between 1 ng/mL to 100 ng/mL.

[0012] In other examples, binding activity is the dissociation constant (K_{D}) as determined using a biosensor, and the antibody, or antigen-binding fragment thereof, exhibits a ratio of at least 3 if there is at least 3-fold tighter affinity under conditions in the tumor-microenvironment compared to under conditions in a non-tumor microenvironment. In such examples, the anti-EGFR antibody, or antigen-binding fragment thereof, typically has a dissociation constant (K_{D}) that is less than 1×10⁻⁸ M, 5×10⁻⁹ M, 1×10⁻⁹ M, 5×10⁻¹⁰ M, 1×10⁻¹⁰ M, 5×10⁻¹¹ M, 1×10⁻¹¹ M or less under conditions that exist in a tumor microenvironment. In further examples, binding activity is the off-rate as determined using a biosensor, and the antibody, or antigen-binding fragment thereof, exhibits a ratio of at least 3 if the off-rate is at least 3 times slower under conditions that exist in a tumor microenvironment compared to under conditions that exist under a non-tumor microenvironment. In any of such examples using a biosensor, the biosensor can be a Biacore sensor or Octet sensor or other similar biosensor known to the skilled artisan.

[0013] In a further example herein, binding activity is assessed in vivo in a subject in a tumor microenvironment expressing EGFR or in a non-tumor microenvironment expressing EGFR. In such an example, the non-tumor microenvironment is the basal layer of the skin expressing human EGFR. Such in vivo binding activity can be determined in a subject that is a non-human animal, where the tumor microenvironment is a human tumor xenograft expressing human EGFR and the non-tumor microenvironment is a human skin xenograft expressing human EGFR. For example, the human tumor xenograft is an A431 xenograft. In such examples, the anti-EGFR antibody, or antigen-binding fragment thereof, can be fluorescently labeled, and binding activity under both conditions is determined as the fluorescent signal intensity, which can be normalized to a control IgG.

[0014] In any of the examples of the anti-EGFR antibody, or antigen-binding fragment thereof, provided herein, the ratio of activity is at least 3.5, 4, 5, 6, 7, 8, 9, 10, 11, 12, 13, 14, 15, 16, 17, 18, 19, 20, 25, 30, 35, 40, 45, 50, 55, 60 or more.

[0015] In any of the examples of the anti-EGFR antibody, or antigen-binding fragment thereof, provided herein, the anti-EGFR antibody, or antigen-binding fragment thereof, contains a variable heavy chain that exhibits at least 56% sequence identity to its closest human V_{H} gene segment germline sequence; and a light chain that exhibits at least 75% sequence identity to its closest human V_{L} gene segment germline sequence.

[0016] For example, including among anti-EGFR antibodies, or antigen-binding fragments thereof, provided herein is an antibody that contains: a variable heavy (VH) chain having the sequence of amino acids set forth in SEQ ID NO:495, 1062, 1112, 1114-1117, 1124-1126, 1128-1130, 1134-1137, or 1146-1152, or a sequence of amino acids that exhibits at least 85% sequence identity to any of SEQ ID NOS: 495, 1062, 1112, 1114-1117, 1124-1126, 1128-1130, 1134-1137, or 1146-1152; and a variable light (VL) chain having the sequence of amino acids set forth in SEQ ID NO:4, 10, 1138-1145, 1153-1159 or 1186, or a sequence of amino acids that exhibits at least 85% sequence identity to SEQ ID NO:4, 10, 1138-1145, 1153-1159 or 1186.

[0017] For example, among non-limiting examples of anti-EGFR antibody, or antigen-binding fragment thereof, provided herein is an antibody that contains:

[0018] a) the variable heavy chain set forth in SEQ ID NO:495 or a sequence of amino acids that exhibits at least 85% sequence identity to SEQ ID NO:495, and the variable light chain set forth in SEQ ID NO:4 or 10 or a sequence of amino acids that exhibits at least 85% sequence identity to SEQ ID NO:4 or 10;

[0019] b) the variable heavy chain set forth in SEQ ID NO:1062 or a sequence of amino acids that exhibits at least 85% sequence identity to SEQ ID NO:1062, and the variable light chain set forth in SEQ ID NO:4 or 10 or a sequence of amino acids that exhibits at least 85% sequence identity to SEQ ID NO:4 or 10;

[0020] c) the variable heavy chain set forth in SEQ ID NO:1112 or a sequence of amino acids that exhibits at least 85% sequence identity to SEQ ID NO:1112, and the variable light chain set forth in SEQ ID NO:4 or 10 or a sequence of amino acids that exhibits at least 85% sequence identity to SEQ ID NO:4 or 10;

[0021] d) the variable heavy chain set forth in SEQ ID NO:1114 or a sequence of amino acids that exhibits at least 85% sequence identity to SEQ ID NO:1114, and the variable light chain set forth in SEQ ID NO:4 or 10 or a sequence of amino acids that exhibits at least 85% sequence identity to SEQ ID NO:4 or 10;

[0022] e) the variable heavy chain set forth in SEQ ID NO:1115 or a sequence of amino acids that exhibits at least 85% sequence identity to SEQ ID NO:1115, and the variable light chain set forth in SEQ ID NO:4 or 10 or a sequence of amino acids that exhibits at least 85% sequence identity to SEQ ID NO:4 or 10;

[0023] f) the variable heavy chain set forth in SEQ ID NO:1116 or a sequence of amino acids that exhibits at least 85% sequence identity to SEQ ID NO:1116, and the variable light chain set forth in SEQ ID NO:4 or 10 or a sequence of amino acids that exhibits at least 85% sequence identity to SEQ ID NO:4 or 10;

[0024] g) the variable heavy chain set forth in SEQ ID NO:1117 or a sequence of amino acids that exhibits at least 85% sequence identity to SEQ ID NO:1117, and the variable light chain set forth in SEQ ID NO:4 or 10 or a sequence of amino acids that exhibits at least 85% sequence identity to SEQ ID NO:4 or 10;

[0025] h) the variable heavy chain set forth in SEQ ID NO:1124 or a sequence of amino acids that exhibits at least 85% sequence identity to SEQ ID NO:1124, and the variable light chain set forth in SEQ ID NO:4 or 10 or a sequence of amino acids that exhibits at least 85% sequence identity to SEQ ID NO:4 or 10;

[0026] i) the variable heavy chain set forth in SEQ ID NO:1125 or a sequence of amino acids that exhibits at least 85% sequence identity to SEQ ID NO:1125, and the variable light chain set forth in SEQ ID NO:4 or 10 or a sequence of amino acids that exhibits at least 85% sequence identity to SEQ ID NO:4 or 10;

[0027] j) the variable heavy chain set forth in SEQ ID NO:1126 or a sequence of amino acids that exhibits at least 85% sequence identity to SEQ ID NO:1126, and the variable light chain set forth in SEQ ID NO:4 or 10 or a sequence of amino acids that exhibits at least 85% sequence identity to SEQ ID NO:4 or 10;

[0028] k) the variable heavy chain set forth in SEQ ID NO:1128 or a sequence of amino acids that exhibits at least 85% sequence identity to SEQ ID NO:1128, and the variable light chain set forth in SEQ ID NO:4 or 10 or a sequence of amino acids that exhibits at least 85% sequence identity to SEQ ID NO:4 or 10;

[0029] l) the variable heavy chain set forth in SEQ ID NO:1129 or a sequence of amino acids that exhibits at least 85% sequence identity to SEQ ID NO:1129, and the variable light chain set forth in SEQ ID NO:4 or 10 or a sequence of amino acids that exhibits at least 85% sequence identity to SEQ ID NO:4 or 10;

[0030] m) the variable heavy chain set forth in SEQ ID NO:1130 or a sequence of amino acids that exhibits at least 85% sequence identity to SEQ ID NO:1130, and the variable light chain set forth in SEQ ID NO:4 or 10 or a sequence of amino acids that exhibits at least 85% sequence identity to SEQ ID NO:4 or 10;

[0031] n) the variable heavy chain set forth in SEQ ID NO:1134 or a sequence of amino acids that exhibits at least 85% sequence identity to SEQ ID NO:1134, and the variable light chain set forth in SEQ ID NO:1138 or a sequence of amino acids that exhibits at least 85% sequence identity to SEQ ID NO:1138;

[0032] o) the variable heavy chain set forth in SEQ ID NO:1134 or a sequence of amino acids that exhibits at least 85% sequence identity to SEQ ID NO:1134, and the variable light chain set forth in SEQ ID NO:1139 or a sequence of amino acids that exhibits at least 85% sequence identity to SEQ ID NO:1139;

[0033] p) the variable heavy chain set forth in SEQ ID NO:1135 or a sequence of amino acids that exhibits at least 85% sequence identity to SEQ ID NO:1135, and the variable light chain set forth in SEQ ID NO:1138 or a sequence of amino acids that exhibits at least 85% sequence identity to SEQ ID NO:1138;

[0034] q) the variable heavy chain set forth in SEQ ID NO:1134 or a sequence of amino acids that exhibits at least 85% sequence identity to SEQ ID NO:1134, and the variable light chain set forth in SEQ ID NO:1140 or a sequence of amino acids that exhibits at least 85% sequence identity to SEQ ID NO:1140;

[0035] r) the variable heavy chain set forth in SEQ ID NO:1134 or a sequence of amino acids that exhibits at least 85% sequence identity to SEQ ID NO:1134, and the variable light chain set forth in SEQ ID NO:1141 or a sequence of amino acids that exhibits at least 85% sequence identity to SEQ ID NO:1141;

[0036] s) the variable heavy chain set forth in SEQ ID NO:1134 or a sequence of amino acids that exhibits at least 85% sequence identity to SEQ ID NO:1134, and the variable light chain set forth in SEQ ID NO:1142 or a sequence of amino acids that exhibits at least 85% sequence identity to SEQ ID NO:1142;

[0037] t) the variable heavy chain set forth in SEQ ID NO:1135 or a sequence of amino acids that exhibits at least 85% sequence identity to SEQ ID NO:1135, and the variable light chain set forth in SEQ ID NO:1142 or a sequence of amino acids that exhibits at least 85% sequence identity to SEQ ID NO:1142;

[0038] u) the variable heavy chain set forth in SEQ ID NO:1134 or a sequence of amino acids that exhibits at least 85% sequence identity to SEQ ID NO:1134, and the variable light chain set forth in SEQ ID NO:1143 or a sequence of amino acids that exhibits at least 85% sequence identity to SEQ ID NO:1143;

[0039] v) the variable heavy chain set forth in SEQ ID NO:1136 or a sequence of amino acids that exhibits at least 85% sequence identity to SEQ ID NO:1136, and the variable light chain set forth in SEQ ID NO:1142 or a sequence of amino acids that exhibits at least 85% sequence identity to SEQ ID NO:1142;

[0040] w) the variable heavy chain set forth in SEQ ID NO:1137 or a sequence of amino acids that exhibits at least 85% sequence identity to SEQ ID NO:1137, and the variable light chain set forth in SEQ ID NO:1144 or a sequence of amino acids that exhibits at least 85% sequence identity to SEQ ID NO:1144;

[0041] x) the variable heavy chain set forth in SEQ ID NO:1136 or a sequence of amino acids that exhibits at least 85% sequence identity to SEQ ID NO:1136, and the variable light chain set forth in SEQ ID NO:1144 or a sequence of amino acids that exhibits at least 85% sequence identity to SEQ ID NO:1144;

[0042] y) the variable heavy chain set forth in SEQ ID NO:1137 or a sequence of amino acids that exhibits at least 85% sequence identity to SEQ ID NO:1137, and the variable light chain set forth in SEQ ID NO:1145 or a sequence of amino acids that exhibits at least 85% sequence identity to SEQ ID NO:1145;

[0043] z) the variable heavy chain set forth in SEQ ID NO:1136 or a sequence of amino acids that exhibits at least 85% sequence identity to SEQ ID NO:1136, and the variable light chain set forth in SEQ ID NO:1145 or a sequence of amino acids that exhibits at least 85% sequence identity to SEQ ID NO:1145;

[0044] aa) the variable heavy chain set forth in SEQ ID NO:1146 or a sequence of amino acids that exhibits at least 85% sequence identity to SEQ ID NO:1146, and the variable light chain set forth in SEQ ID NO:1153 or a sequence of amino acids that exhibits at least 85% sequence identity to SEQ ID NO:1153;

[0045] bb) the variable heavy chain set forth in SEQ ID NO:1147 or a sequence of amino acids that exhibits at least 85% sequence identity to SEQ ID NO:1147, and the variable light chain set forth in SEQ ID NO:1153 or a sequence of amino acids that exhibits at least 85% sequence identity to SEQ ID NO:1153;

[0046] cc) the variable heavy chain set forth in SEQ ID NO:1148 or a sequence of amino acids that exhibits at least 85% sequence identity to SEQ ID NO:1148, and the variable light chain set forth in SEQ ID NO:1154 or a sequence of amino acids that exhibits at least 85% sequence identity to SEQ ID NO:1154;

[0047] dd) the variable heavy chain set forth in SEQ ID NO:1149 or a sequence of amino acids that exhibits at least 85% sequence identity to SEQ ID NO:1149, and the variable light chain set forth in SEQ ID NO:1154 or a sequence of amino acids that exhibits at least 85% sequence identity to SEQ ID NO:1154;

[0048] ee) the variable heavy chain set forth in SEQ ID NO:1150 or a sequence of amino acids that exhibits at least 85% sequence identity to SEQ ID NO:1150, and the variable light chain set forth in SEQ ID NO:1155 or a sequence of amino acids that exhibits at least 85% sequence identity to SEQ ID NO:1155;

[0049] ff) the variable heavy chain set forth in SEQ ID NO:1151 or a sequence of amino acids that exhibits at least 85% sequence identity to SEQ ID NO:1151, and the variable light chain set forth in SEQ ID NO:1156 or a sequence of amino acids that exhibits at least 85% sequence identity to SEQ ID NO:1156;

[0050] gg) the variable heavy chain set forth in SEQ ID NO:1146 or 1148 or a sequence of amino acids that exhibits at least 85% sequence identity to SEQ ID NO:1146 or 1148, and the variable light chain set forth in SEQ ID NO:1156 or a sequence of amino acids that exhibits at least 85% sequence identity to SEQ ID NO:1156;

[0051] hh) the variable heavy chain set forth in SEQ ID NO:1149 or a sequence of amino acids that exhibits at least 85% sequence identity to SEQ ID NO:1149, and the variable light chain set forth in SEQ ID NO:1156 or a sequence of amino acids that exhibits at least 85% sequence identity to SEQ ID NO:1156;

[0052] ii) the variable heavy chain set forth in SEQ ID NO:1150 or a sequence of amino acids that exhibits at least 85% sequence identity to SEQ ID NO:1150, and the variable light chain set forth in SEQ ID NO:1157 or a sequence of amino acids that exhibits at least 85% sequence identity to SEQ ID NO:1157;

[0053] jj) the variable heavy chain set forth in SEQ ID NO:1152 or a sequence of amino acids that exhibits at least 85% sequence identity to SEQ ID NO:1152, and the variable light chain set forth in SEQ ID NO:1157 or a sequence of amino acids that exhibits at least 85% sequence identity to SEQ ID NO:1157;

[0054] kk) the variable heavy chain set forth in SEQ ID NO:1148 or a sequence of amino acids that exhibits at least 85% sequence identity to SEQ ID NO:1148, and the variable light chain set forth in SEQ ID NO:1157 or a sequence of amino acids that exhibits at least 85% sequence identity to SEQ ID NO:1157;

[0055] ll) the variable heavy chain set forth in SEQ ID NO:1149 or a sequence of amino acids that exhibits at least 85% sequence identity to SEQ ID NO:1149, and the variable light chain set forth in SEQ ID NO:1157 or a sequence of amino acids that exhibits at least 85% sequence identity to SEQ ID NO:1157;

[0056] mm) the variable heavy chain set forth in SEQ ID NO:1150 or a sequence of amino acids that exhibits at least 85% sequence identity to SEQ ID NO:1150, and the variable light chain set forth in SEQ ID NO:1186 or a sequence of amino acids that exhibits at least 85% sequence identity to SEQ ID NO:1186;

[0057] nn) the variable heavy chain set forth in SEQ ID NO:1152 or a sequence of amino acids that exhibits at least 85% sequence identity to SEQ ID NO:1152, and the variable light chain set forth in SEQ ID NO:1186 or a sequence of amino acids that exhibits at least 85% sequence identity to SEQ ID NO:1186;

[0058] oo) the variable heavy chain set forth in SEQ ID NO:1148 or a sequence of amino acids that exhibits at least 85% sequence identity to SEQ ID NO:1148, and the variable light chain set forth in SEQ ID NO:1186 or a sequence of amino acids that exhibits at least 85% sequence identity to SEQ ID NO:1186;

[0059] pp) the variable heavy chain set forth in SEQ ID NO:1149 or a sequence of amino acids that exhibits at least 85% sequence identity to SEQ ID NO:1149, and the variable light chain set forth in SEQ ID NO:1186 or a sequence of amino acids that exhibits at least 85% sequence identity to SEQ ID NO:1186;

[0060] qq) the variable heavy chain set forth in SEQ ID NO:1150 or a sequence of amino acids that exhibits at least 85% sequence identity to SEQ ID NO:1150, and the variable light chain set forth in SEQ ID NO:1158 or a sequence of amino acids that exhibits at least 85% sequence identity to SEQ ID NO:1158;

[0061] rr) the variable heavy chain set forth in SEQ ID NO:1152 or a sequence of amino acids that exhibits at least 85% sequence identity to SEQ ID NO:1152, and the variable light chain set forth in SEQ ID NO:1159 or a sequence of amino acids that exhibits at least 85% sequence identity to SEQ ID NO:1159;

[0062] ss) the variable heavy chain set forth in SEQ ID NO:1146 or a sequence of amino acids that exhibits at least 85% sequence identity to SEQ ID NO:1146, and the variable light chain set forth in SEQ ID NO:1159 or a sequence of amino acids that exhibits at least 85% sequence identity to SEQ ID NO:1159;

[0063] tt) the variable heavy chain set forth in SEQ ID NO:1146 or a sequence of amino acids that exhibits at least 85% sequence identity to SEQ ID NO:1146, and the variable light chain set forth in SEQ ID NO:1157 or a sequence of amino acids that exhibits at least 85% sequence identity to SEQ ID NO:1157;

[0064] uu) the variable heavy chain set forth in SEQ ID NO:1146 or a sequence of amino acids that exhibits at least 85% sequence identity to SEQ ID NO:1146, and the variable light chain set forth in SEQ ID NO:1186 or a sequence of amino acids that exhibits at least 85% sequence identity to SEQ ID NO:1186; and

[0065] vv) the variable heavy chain set forth in SEQ ID NO:1118 or a sequence of amino acids that exhibits at least 85% sequence identity to SEQ ID NO:1118, and the variable light chain set forth in SEQ ID NO:4 or 10 or a sequence of amino acids that exhibits at least 85% sequence identity to SEQ ID NO:4 or 10.

[0066] 33. The anti-EGFR antibody, or antigen-binding fragment thereof, of claim 31 or claim 32, wherein sequence identity is at least 86%, 87%, 88%, 89%, 90%, 91%, 92%, 93%, 94%, 95%, 96%, 97%, 98%, 98%, 99% or more.

[0067] Included among any of the anti-EGFR antibody, or antigen-binding fragment thereof, provided herein, the antibody or antigen-binding fragment thereof is capable of being expressed in mammalian cells containing nucleic acid(s) encoding the antibody at a concentration of at least 1 mg/mL, for example at least 1.5 mg/mL, 2 mg/mL, 3 mg/mL, 5 mg/mL, 6 mg/mL, 7 mg/mL, 8 mg/mL, 9 mg/mL, 10 mg/mL or more.

[0068] Any of the anti-EGFR antibodies, or antigen-binding fragments, provided herein are antibodies that are a modified anti-EGFR antibody or antigen-binding fragment thereof. For example, among the conditionally active anti-EGFR antibodies provided herein, are anti-EGFR antibodies and antigen-binding fragments thereof that are variants of anti-EGFR antibodies that do not exhibit this conditional activity or that exhibit conditional activity to a lesser extent. Hence, provided are antibodies that are modified forms of the therapeutic antibody designated cetuximab and other variants of cetuximab, such as humanized versions thereof and other forms (see, e.g., published International PCT application Nos. WO2011059762, WO2005056606A2, WO2006009694, WO2010080463, WO2012020059, WO2008152537, WO9640210 and U.S. Pat. Nos. 7,060,808 7,723,484 and 7,930,107, which describe anti-EGFR antibodies). Thus, the unmodified antibody can be a cetuximab antibody, antigen-binding fragment thereof and variants thereof that do not include the amino acid replacement and specifically binds to EGFR (see, e.g., those anti-EGFR antibodies described in any of published International PCT application Nos. WO2011059762, WO2005056606A2, WO2006009694, WO2010080463, WO2012020059, WO2008152537, WO9640210 and U.S. Pat. Nos. 7,060,808, 7,723,484 and 7,930,107 and other family member applications/patents). The modified anti-EGFR antibody and fragments thereof are conditionally active in a tumor microenvironment.

[0069] The conditionally active antibodies, such as modified, anti-EGFR antibodies and antigen-binding fragments thereof include those with an amino acid replacement(s) in a variable heavy chain, variable light chain or both of the unmodified antibody or in such regions in the antigen-binding fragments thereof. In some examples, the unmodified anti-EGFR antibody is cetuximab, an antigen-binding fragment thereof or a variant thereof that does not include the amino acid replacement and specifically binds to EGFR. In particular examples, the modified anti-EGFR antibody and fragment thereof can exhibit a ratio of binding activity for EGFR at or about pH 6.0 to pH 6.5 compared to at or about pH 7.4 of at least 2.0, when measured under the same conditions except for the difference in pH. In some examples, the modified anti-EGFR antibody exhibits less than 40% of the binding activity for EGFR at pH 7.4 compared to the unmodified antibody at pH 7.4 when measured under the same conditions, with the proviso that the modified anti-EGFR antibody and fragment thereof does not include: a) a variable heavy chain that includes an amino acid replacement selected from among N31I, N31V, V50L, Y59E and T64N; or b) a variable light chain that includes an amino acid replacement L4C.

[0070] In any of the examples of the modified anti-EGFR antibodies and fragments thereof provided herein, the modified anti-EGFR antibody exhibits at least 20% of the binding activity for EGFR at or about pH 6.0 to pH 6.5 compared to the unmodified antibody at pH 6.0 to pH 6.5 when measured under the same conditions.

[0071] In any examples of the modified anti-EGFR antibodies and fragments thereof, the variable heavy chain, or a portion thereof, includes an amino acid replacement corresponding to an amino acid replacement selected from among HC-V24E, HC-V24I, HC-V24L, HC-S25C, HC-S25H, HC-S25R, HC-S25A, HC-S25D, HC-S25G, HC-S25M, HC-S25Q, HC-S25V, HC-S25L, HC-S28C, HC-L29H, HC-N31H, HC-G54D, HC-G54S, HC-F63R, HC-F63C, HC-F63M, HC-F63P, HC-F63S, HC-T64V, HC-L67G, HC-D72L, HC-D72P, HC-D72W, HC-N73Q, HC-K75H, HC-K75G, HC-K75P, HC-K75W, HC-S761, HC-S76V, HC-Q77E, HC-T100P, HC-Y104D, HC-Y1045, HC-Y104V, HC-Q111I, HC-Q111V, with reference to amino acid positions set forth in SEQ ID NO:3. Corresponding amino acid positions can be identified by alignment of the VH chain of the antibody with the VH chain set forth in SEQ ID NO:3. The portion thereof can be sufficient to form an antigen binding site and include the amino acid replacement. In some examples, the modified variable light chain, or portion thereof, includes an amino acid replacement corresponding to an amino acid replacement selected from among LC-L4F, LC-L4V, LC-T5P and LC-R24G, with reference to amino acid positions set forth in SEQ ID NO:4. Corresponding amino acid positions can be identified by alignment of the VL chain of the antibody with the VL chain set forth in SEQ ID NO:4, and the portion thereof can be sufficient to form an antigen binding site and include the amino acid replacement.

[0072] Also included among modified anti-EGFR antibodies and antigen binding fragments thereof provided herein include those with an amino acid replacement(s) of one or more amino acid residues in the complementarity determining region (CDR) L2 of a variable light chain of the unmodified antibody. In the modified anti-EGFR antibodies and antigen-binding fragments thereof provided herein, the variable light chain, or portion thereof, can include an amino acid replacement corresponding to an amino acid replacement selected from among LC-A51T, LC-A51L, LC-S52A, LC-S52C, LC-S52D, LC-S52E, LC-S52G, LC-S52I, LC-S52M, LC-S52Q, LC-S52V, LC-S52W, LC-S52R, LC-S52K, LC-E53G, LC-S54M, LC-155A, LC-155F, LC-S56G, LC-S56L, LC-S56A, LC-S56C, LC-S56D, LC-S56E, LC-S56F, LC-S56N, LC-S56P, LC-S56Q, LC-S56V, LC-S56W, LC-S56H, LC-S56R and LC-S56K corresponding to amino acid residues set forth in SEQ ID NO:4. The portion thereof can be sufficient to form an antigen binding site and include the amino acid replacement. In some examples of any of the modified anti-EGFR antibodies and fragments thereof provided herein, the modified anti-EGFR antibody and fragment thereof is conditionally active in a tumor microenvironment.

[0073] Also included among the modified anti-EGFR antibodies and antigen-binding fragment thereof, are any that can include an amino acid replacement in a variable heavy (VH) chain, variable light (VL) chain or both of the unmodified antibody. In some examples of the modified anti-EGFR antibodies provided herein, the unmodified anti-EGFR antibody is cetuximab, an antigen-binding fragment or a variant thereof that does not include the amino acid replacement and specifically binds to EGFR. The amino acid replacement residue in the VH chain can occur at an amino acid position corresponding to amino acid residues selected from among, for example, 26, 36, 66, 69, 75, 93, 94, 109, 110, 111 and 112 with reference to amino acid positions set forth in SEQ ID NO:3, and corresponding amino acid positions are identified by alignment of the VH chain of the antibody with the VH chain set forth in SEQ ID NO:3. In some examples, the amino acid replacement in the VL chain occurs at an amino acid position corresponding to amino acid residues selected from among 29, 48, 51, 52, 53, 55, 56, 86 and 98, with reference to amino acid positions set forth in SEQ ID NO:4, and corresponding amino acid positions are identified by alignment of the VL chain of the antibody with the VL chain set forth in SEQ ID NO:4. In some examples of any of the modified anti-EGFR antibodies and fragments thereof provided herein, the modified anti-EGFR antibody and fragment thereof is conditionally active in a tumor microenvironment.

[0074] The modified anti-EGFR antibodies, or antigen-binding fragments thereof, provided herein include any in which the variable heavy chain, or portion thereof, includes an amino acid replacement corresponding to an amino acid replacement selected from among G26H, G026R, G026D, G026F, G026M, G026N, G026P, G026Q, G026S, G026Y, G026L, W036K, W036A, W036I, W036V, W036Y, R066L, R066A, R066C, R066E, R066F, R066N, R066P, R066Q, R066S, R066T, R066V, R066G, I069A, I069C, I069G, 069Y, K075H, K075R, K075L, K075A, K075C, K075E, K075F, K75G, K075M, K75P, K075Q, K075T, K075V, K075W, K075Y, Y093H, Y093V, Y093W, Y094R, Y094L, W109I, W109M, W109Y, G110R, G110A, G110M, G110P, G110T, Q111K, Q111H, Q111R, Q111L, Q111D, Q111E, Q111G, Q111I, Q111M, Q111P, Q111S, Q111T, Q111V, Q111W, Q111Y, G112A, G112N, G112P, G112S, G112T and HC-G112Y, with reference to amino acid residues set forth in SEQ ID NO:3, and the portion thereof is sufficient to form an antigen binding site and includes the amino acid replacement; and/or the variable light chain, or portion thereof, includes an amino replacement corresponding to an amino acid replacement selected from among I029A, I029E, I029F, I029S, I029T, I029R, I048M, I048S, I048L, I048K, A051T, A051L, S052A, S052C, S052D, S052E, S052G, S052I, S052M, S052Q, S052V, S052W, S052R, S052K, E53G, I055A, I055F, S056G, S056L, S056A, S056C, S056D, S056E, S056F, S056N, S056P, S056Q, S056V, S056W, S056H, S056R, S056K, Y086F, Y086M, Y086H, F098A, F098M, F098S, F098V and F098Y, with reference to residues set forth in SEQ ID NO:4, and the portion thereof is sufficient to form an antigen binding site and includes the amino acid replacement.

[0075] In any of examples herein, the ratio of binding activity of the modified anti-EGFR antibodies and antigen-binding fragments thereof, at pH 6.0 or pH 6.5, compared to at or about pH 7.4 is at least 1.1, 1.2, 1.3, 1.4, 1.5, 1.6, 1.7, 1.8, 1.9, 2.0, 2.5, 3.0, 4.0, 4.5, 5.0, or greater. In any of the examples herein, the modified anti-EGFR antibodies, and antigen-binding fragments thereof, provided herein, exhibit greater binding activity for EGFR at or about pH 6.0 to pH 6.5 compared to at or about pH 7.4 of at least 2.0, when measured under the same conditions except for the difference in pH.

[0076] In any of the examples herein, the modified anti-EGFR antibodies, or antigen-binding fragments thereof, provided herein, can exhibit reduced binding activity at pH 7.4 for EGFR compared to the corresponding form of a cetuximab antibody that includes a variable heavy chain set forth in SEQ ID NO:3 and a variable light chain set forth in SEQ ID NO:4 or SEQ ID NO:10 at pH 7.4, and binding activity is measured under the same conditions. For example, the modified anti-EGFR antibodies, or antigen-binding fragments thereof, can exhibit less than 90%, 80%, 70%, 60%, 50%, 40%, 30%, 20% or less of the binding activity of the corresponding form of a cetuximab antibody.

[0077] In any of the examples herein, the modified anti-EGFR antibodies, or antigen-binding fragments thereof, provided herein, can exhibit increased binding activity at or about pH 6.0 to 6.5 for EGFR compared to the corresponding form of a cetuximab antibody that includes a variable heavy chain set forth in SEQ ID NO:3 and a variable light chain set forth in SEQ ID NO:4 or SEQ ID NO:10 at pH 7.4, and binding activity is measured under the same conditions. For example, the modified anti-EGFR antibodies, or antigen-binding fragments thereof, can exhibit greater than 110%, 120%, 130%, 140%, 150%, 160%, 170%, 180%, 190%, 200%, 250%, 300%, 350%, 400%, 500% or more of the binding activity of the corresponding form of a cetuximab antibody.

[0078] Also included among anti-EGFR antibodies provided herein are modified anti-EGFR antibodies, or antigen-binding fragments thereof, that include an amino acid replacement(s) in a variable heavy (VH) chain, variable light (VL) chain or both of the unmodified antibody. In some examples, the unmodified anti-EGFR antibody is cetuximab, an antigen-binding fragment thereof or variant thereof that does not include the amino acid replacement(s) and specifically binds to EGFR. The VH chain, or portion thereof, can include one or more amino acid replacement(s) corresponding to amino acid replacement(s) selected from among T023H, T023R, T023C, T023E, T023G, T023I, T023M, T023N, T023P, T023S, T023V, T023W, T023L, V024R, V024F, V024G, V024I, V024M, V024P, V024S, V024T, V024L, S025H, S025R, S025A, S025D, S025E, S025F, S025G, S025I, S025M, S025P, S025Q, S025T, S025V, S025L, G026H, G026R, G026D, G026F, G026M, G026N, G026P, G026Q, G026S, G026Y, G026L, F027H, F027R, F027A, F027D, F027E, F027M, F027P, F027Q, F027S, F027T, F027V, F027W, F027Y, F027L, S028K, S028H, S028R, S028A, S028D, S028I, S028M, S028P, S028Q, S028V, S028W, S028L, L029K, L029H, L029A, L029D, L029G, L029M, L029N, L029S, L029V, T030H, T030R, T030D, T030G, T030I, T030M, T030N, T030P, T030V, T030W, T030Y, N031K, N031H, N031E, N031G, N031L, Y032H, Y032C, Y032M, Y032N, Y032T, Y032V, Y032L, G033M, G033S, G033T, V034A, V034C, V034I, V034M, V034P, H035I, H035Q, W036K, W036A, W036I, W036V, W036Y, V050K, V050H, V050A, V050D, V050G, V050T, I051K, I051H, I051E, I051N, I051Y, I051L, W052I, W052N, S053H, S053R, S053A, S053C, S053G, S053I, S053M, S053P, S053L, S053V, S053Y, G054H, G054R, G054A, G054C, G054D, G054P, G054S, G055R, G055M, G055S, G055Y, N056K, N056P, N056V, T057H, T057R, T057L, T057C, T057F, T057M, T057N, T057Q, T057W, T057Y, D058L, D058G, D058M, D058Q, Y059R, Y059D, Y059I, Y059T, Y059V, N060K, N060C, N060F, N060G, N060P, N060Q, N060S, N060T, N060Y, T061N, T061Q, P062G, F063H, F063R, F063A, F063C, F063D, F063G, F063M, F063N, F063Q, F063S, T064R, T064L, T064C, T064F, T064G, T064Q, T064V, S065H, S065R, S065L, S065C, S065E, S065F, S065I, S065M, S065N, S065P, S065Q, S065T, S065W, S065Y, R066L, R066A, R066C, R066E, R066F, R066N, R066P, R066Q, R066S, R066T, R066V, R066G, L067A, L067C, L067D, L067E, L067I, L067M, L067Q, L067S, L067T, L067Y, S068K, S068H, S068R, S068L, S068C, S068D, S068E, S068F, S068G, S068I, S068N, S068Q, S068V, I069A, I069C, I069G, I069Y, N070H, N070R, N070L, N070D, N070E, N070F, N070G, N070I, N070P, N070Q, N070V, N070Y, K071H, K071R, K071L, K071C, K071F, K071G, K071Q, K071S, K071T, K071W, K071Y, D072K, D072H, D072R, D072L, D072A, D072G, D072I, D072M, D072N, D072Q, D072S, D072V, D072W, D072Y, N073H, N073R, N073L, N073A, N073C, N073G, N073I, N073M, N073P, N073Q, N073S, N073V, N073W, N073Y, S074K, S074H, S074R, S074L, S074C, S074D, S074E, S074G, S074I, S074M, S074P, S074T, S074V, S074Y, K075H, K075R, K075L, K075A, K075C, K075E, K075F, K075M, K075Q, K075T, K075V, K075W, K075Y, S076H, S076R, S076L, S076A,

[0079] S076C, S076D, S076E, S076F, S076M, S076P, S076Q, S076T, S076Y, Q077H, Q077R, Q077L, Q077A, Q077E, Q077G, Q077I, Q077M, Q077N, Q077V, Q077W, Q077Y, Y093H, Y093V, Y093W, Y094R, Y094L, R097H, R097W, A098P, L099N, L099W, T100H, T100L, T100I, T100N, T100P, T100Q, T100S, T100V, T100Y, Y101H, Y101E, Y101F, Y101M, Y102R, Y102D, Y102I, Y102N, Y102W, D103R, D103L, D103A, D103I, D103Q, D103Y, D103P, Y104H, Y104L, Y104D, Y104F, Y104I, Y104M, Y104S, Y104V, E105H, E105T, F106L, F106V, F106W, A107K, A107H, A107R, A107L, A107E, A107G, A107N, A107S, A107T, A107Y, A107D, Y108K, Y108H, Y108R, Y108L, Y108I, Y108N, Y108S, Y108T, Y108V, Y108W, W109I, W109M, W109Y, G110R, G110A, G110M, G110P, G110T, Q111K, Q111H, Q111R, Q111L, Q111D, Q111E, Q111G, Q111M, Q111P, Q111S, Q111T, Q111W, Q111Y, G112A, G112N, G112P, G112S, G112T, G112Y, V24E, S28C, F63P, L67G, D72P, K75G, K75P, S76I, S76V, Q111I and Q111V, with reference to amino acid positions set forth in SEQ ID NO:3, and corresponding amino acid positions are identified by alignment of the VH chain of the antibody with the VH chain set forth in SEQ ID NO:3; and the portion thereof is sufficient to form an antigen binding site and includes the amino acid replacement. In some examples, the VL chain, or portion thereof, includes an amino acid replacement(s) corresponding to amino acid replacement(s) selected from among D001W, I002V, I002W, L003D, L003F, L003G, L0035, L003W, L003Y, L003R, L004E, L004F, L004I, L004P, L004S, L004T, L004V, L004W, L004K, L004H, L004R, T005A, T005D, T005E, T005F, T005G, T005N, T005S, T005W, T005L, T005K, T005H, T005R, R024A, R024c, R024F, R024L, R024M, R024S, R024W, R024Y, A025G, S026A, S026C, S026I, S026M, S026N, S026V, S026W, S026L, S026G, S026H, S026R, Q027A, Q027D, Q027I, Q027M, Q027N, Q027P, S028A, S028D, S028N, S028Q, S028L, S028K, S028H, I029A, I029E, I029F, I029S, I029T, I029R, G030E, G030I, G030P, G030V, G030L, T031A, T031F, T031G, T031M, T031S, T031W, T031L, T031K, T031H, N032G, I033F, I033G, I033M, I033T, I033V, I033H, I048M, I048S, I048L, I048K, K049A, K049E, K049G, K049N, K049Q, K049S, K049T, K049V, K049L, K049H, K049R, A051T, A051L, S052A, S052C, S052D, S052E, S052G, S052I, S052M, S052Q, S052V, S052W, S052R, S052K, E053G, S054M, I055A, I055F, S056G, S056L, S056A, S056C, S056D, S056E, S056F, S056N, S056P, S056Q, S056V, S056W, S056H, S056R, S056K, Y086F, Y086M, Y086H, Y087L, Y087C, Y087D, Y087F, Y087G, Y087I, Y087N, Y087P, Y087T, Y087V, Y087W, Y087K, Y087H, Y087R, Q089E, N091A, N091I, N091M, N091S, N091T, N091V, N091H, N091R, N092D, N092S, N092T, N092V, N092W, N092R, N093T, T096M, T096V, T097V, F098A, F098M, F098S, F098V, F098Y, G099L, G099D, G099E, G099F, G099I, G099M, G099N, G099S, G099T, G099V, G099K, G099H, Q100C, Q100D, Q100E, Q100F, Q100I, Q100M, Q100N, Q100P, Q100T, Q100V, Q100W, Q100Y, Q100K, Q100H and Q100R, with reference to amino acid positions set forth in SEQ ID NO:4, and corresponding amino acid positions are identified by alignment of the VL chain of the antibody with the VL chain set forth in SEQ ID NO:4; and the portion thereof is sufficient to form an antigen binding site and includes the amino acid replacement.

[0080] In any of the examples of the modified anti-EGFR antibodies, or antigen binding fragments thereof, provided herein, the variable heavy chain, or portion thereof, can include an amino acid replacement(s) selected from among V024I, V024E, V024L, S025C, S025G, S025I, S025Q, S025T, S025L, S025V, F027R, T030F, Y032T, S053G, G054R, G054C, G054P, D058M, F063R, F063C, F063G, F063M, D072K, D072M, D072W, D072L, S074H, S074R, S074D, S074G, S074Y, K075H, K075W, Q077R, N091V, R097H, T100I, Y104D, Y104F, F027R, L029S, R097H and Q111P; and/or the variable light chain, or portion thereof can include an amino acid replacement L4V or I29S.

[0081] In particular examples herein, the modified anti-EGFR antibodies, or antigen-binding fragments thereof, provided herein the variable heavy chain, or portion thereof, can include an amino acid replacement(s) selected from among V24E, V24I, V24L, S25C, S25H, S25R, S25A, S25D, S25G, S25M, S25Q, S25V, S25L, S28C, L29H, N31H, G54D, G54S, F63R, F63C, F63M, F63P, F63S, T64V, L67G, D72L, D72P, D72W, N73Q, K75H, K75G, K75P, K75W, 5761, S76V, Q77E, T100P, Y104D, Y104S, Y104V, Q111I, Q111V, and can further include an amino acid replacement(s) V24E, S25C, S25V, F27R, T30F, S53G, D72L, R97H, Y104D and Q111P. The modified anti-EGFR antibody, or antigen-binding fragment thereof, can contain 2, 3, 4, 5, 6, 7, 8, 9, 10, 11, 12, 13, 14, 15, 16, 17, 18, 19, 20 or more amino acid replacement(s) in the variable heavy chain, in the variable light chain or both. For example, the modified anti-EGFR antibody, or antigen-binding fragment thereof, contains at least two amino acid replacement(s) in cetuximab, an antigen-binding fragment thereof or a variant thereof that does not comprise the amino acid replacement and specifically binds to EGFR, where the amino acid replacements in the VH chain corresponds to an amino acid replacement selected from among V24E, S25C, S25V, F27R, T30F, S53G, D72L, R97H, Y104D and Q111P, with reference to amino acid positions set forth in SEQ ID NO:3, wherein corresponding amino acid positions are identified by alignment of the VH chain of the antibody with the VH chain set forth in SEQ ID NO:3; and the amino acid replacement in the VL chain corresponds to amino acid replacement I29S, with reference to the amino acid position set forth in SEQ ID NO:4; wherein corresponding amino acid positions are identified by alignment of the VL chain of the antibody with the VL chain set forth in SEQ ID NO:4. For example, that anti-EGFR antibody, or antigen-binding fragment thereof, contains the amino acid replacement(s) HC-Y104D/HC-Q111P; HC-S25C/HC-Y104D; HC-Y104D/LC-I29S; HC-Y104D/HC-Q111P/LC-I29S; HC-S53G/HC-Y104D; HC-S53G/HC-Y104D/HC-Q111P; HC-S25V/HC-Y104D; HC-S25V/HC-Y104D/HC-Q111P; HC-S25V/HC-S53G/HC-Y104D; HC-S25V/HC-S53G/HC-Y104D/HC-Q111P; HC-T30F/HC-Y104D; HC-T30F/HC-Y104D/HC-Q111P; HC-T30F/HC-S53G/HC-Y104D; HC-T30F/HC-S53G/HC-Y104D/HC-Q111P; HC-D72L/HC-Y104D; HC-D72L/HC-Y104D/HC-Q111P; HC-S53G/HC-D72L/HC-Y104D; HC-S53G/HC-D72L/HC-Y104D/HC-Q111P; HC-S25C/HC-Q111P; HC-V24E/HC-F27R/HC-R97H/HC-Q111P; HC-S25C/LC-I29S; or HC-Q111P/LC-I29S. In any of such examples, the modified anti-EGFR antibody or fragment thereof exhibits a ratio of binding activity for EGFR at or about pH 6.0 to pH 6.5 compared to at or about pH 7.4 of at least 1.1, 1.2, 1.3, 1.4, 1.5, 1.6, 1.7, 1.8, 1.9, 2.0, 2.5, 3.0, 4.0, 4.5, 5.0 or greater.

[0082] In particular examples, the modified anti-EGFR antibody or fragment thereof exhibits a ratio of binding activity for EGFR at or about pH 6.0 to pH 6.5 compared to at or about pH 7.4 of at least 2.0, and generally at least 3.0 or higher as described herein. In such examples, the anti-EGFR antibody, or antigen-binding fragment thereof, includes the amino acid replacement Y104D. For example, the amino acid replacements are HC-Y104D/HC-Q111P; HC-S25C/HC-Y104D; HC-S53G/HC-Y104D; HC-S53G/HC-Y104D/HC-Q111P; HC-S25V/HC-Y104D; HC-S25V/HC-Y104D/HC-Q111P; HC-S25V/HC-S53G/HC-Y104D; HC-S25V/HC-S53G/HC-Y104D/HC-Q111P; HC-T30F/HC-Y104D; HC-T30F/HC-Y104D/HC-Q111P; HC-T30F/HC-S53G/HC-Y104D; HC-T30F/HC-S53G/HC-Y104D/HC-Q111P; HC-D72L/HC-Y104D; HC-D72L/HC-Y104D/HC-Q111P; HC-S53G/HC-D72L/HC-Y104D; or HC-S53G/HC-D72L/HC-Y104D/HC-Q111P.

[0083] In any of the examples of the modified anti-EGFR antibodies, or antigen-binding fragments thereof, provided herein, the unmodified cetuximab antibody, antigen-binding fragment thereof or variant thereof includes: a) a heavy chain having a sequence of amino acids set forth in SEQ ID NO: 1 or a sequence of amino acids that exhibits at least 75% sequence identity to the sequence of amino acids set forth in SEQ ID NO:1 and a light chain having a sequence of amino acids set forth SEQ ID NO:2 or a sequence of amino acids that exhibits at least 75% sequence identity to the sequence of amino acids set forth in SEQ ID NO:2; or b) a heavy chain having a having a sequence of amino acids set forth in SEQ ID NO: 8 or a sequence of amino acids that exhibits at least 75% sequence identity to the sequence of amino acids set forth in SEQ ID NO:8 and a light chain having a sequence of amino acids set forth SEQ ID NO:9 or a sequence of amino acids that exhibits at least 75% sequence identity to the sequence of amino acids set forth in SEQ ID NO:9.

[0084] In any of the examples provided herein, the modified anti-EGFR antibodies, or antigen-binding fragments thereof, provided herein include those in which the unmodified cetuximab is a variant that is humanized. For example, in any of the examples of the modified anti-EGFR antibodies, or antigen-binding fragments thereof, provided herein, the unmodified cetuximab includes a variable heavy chain set forth in SEQ ID NO:28 and a variable light chain set forth in SEQ ID NO:29.

[0085] In any of the examples of conditionally active anti-EGFR antibodies, or antigen-binding fragments, provided herein, the antibody is a full-length antibody or is an antigen-binding fragment. For example, the antigen-binding fragment is selected from among a Fab, Fab′, F(ab′)₂, single-chain Fv (scFv), Fv, dsFv, diabody, Fd and Fd′ fragments.

[0086] In any of the examples of the modified anti-EGFR antibodies, or antigen-binding fragments thereof, provided herein, the unmodified cetuximab, antigen-binding fragment thereof or variant thereof is an antigen-binding fragment thereof and the antigen-binding fragment is selected from among a Fab, Fab′, F(ab′)₂, single-chain Fv (scFv), Fv, dsFv, diabody, Fd and Fd′ fragments. For example, the unmodified cetuximab can be a Fab fragment that includes a heavy chain having a sequence of amino acids set forth in SEQ ID NO:5 or a sequence of amino acids that exhibits at least 75% sequence identity to SEQ ID NO:5 and a light chain having a sequence of amino acids set forth in SEQ ID NO:2 or a sequence of amino acids that exhibits at least 75% sequence identity to a sequence of amino acids set forth in SEQ ID NO:2.

[0087] Provided herein are modified anti-EGFR antibodies, or antigen-binding fragments thereof, that include: a) a variable heavy (VH) chain set forth in any of SEQ ID NOS: 31-32, 35-57, 59-85, 87-112, 114-125, 127-131, 133-134, 138-139, 141-149, 148-168, 170, 174, 176-177, 180, 182, 186-189, 191-198, 200, 202-205, 207-210, 212-216, 218, 220-224, 226, 228-236, 238-240, 243, 246, 250-251, 253, 255, 257-268, 270-277, 279-283, 285-292, 294-322, 324-336, 338-352, 355-359, 361-366, 368-394, 396-402, 404-448, 450-465, 467-477, 479, 481-483, 485-487, 489-505, 507-510, 512-523, 525-557, 1062, 1063, 1093, 1098-1107 and 1112-1113 or a sequence of amino acids that exhibits at least 75% sequence identity to any of SEQ ID NOS: 31-32, 35-57, 59-85, 87-112, 114-125, 127-131, 133-134, 138-139, 141-149, 148-168, 170, 174, 176-177, 180, 182, 186-189, 191-198, 200, 202-205, 207-210, 212-216, 218, 220-224, 226, 228-236, 238-240, 243, 246, 250-251, 253, 255, 257-268, 270-277, 279-283, 285-292, 294-322, 324-336, 338-352, 355-359, 361-366, 368-394, 396-402, 404-448, 450-465, 467-477, 479, 481-483, 485-487, 489-505, 507-510, 512-523, 525-557, 1062, 1063, 1093, 1098-1107 and 1112-1113 and includes the amino acid replacement; and/or b) a variable (VL) chain set forth in any of SEQ ID NOS: 558, 560-565, 568-570, 572-583, 585-603, 605, 608-609, 611-621, 624-627, 629-641, 643, 645, 647, 649-650, 652, 656-660, 662-678, 680-685, 687-733, 735-741, 743, 745-751, 753, 756-759, 764-768, 775, 778-809, 810, 812-817, 820-822, 824-835, 837-855, 857, 860-861, 863-873, 876-879, 881-893, 895, 897, 899, 901-902, 904, 908-912, 914-930, 932-937, 939-985, 987-993, 995, 997-1003, 1005, 1008-1011, 1016-1020, 1027, 1030-1061, or a sequence of amino acids that exhibits at least 75% sequence identity to any of SEQ ID NOS: 558, 560-565, 568-570, 572-583, 585-603, 605, 608-609, 611-621, 624-627, 629-641, 643, 645, 647, 649-650, 652, 656-660, 662-678, 680-685, 687-733, 735-741, 743, 745-751, 753, 756-759, 764-768, 775, 778-809, 810, 812-817, 820-822, 824-835, 837-855, 857, 860-861, 863-873, 876-879, 881-893, 895, 897, 899, 901-902, 904, 908-912, 914-930, 932-937, 939-985, 987-993, 995, 997-1003, 1005, 1008-1011, 1016-1020, 1027, 1030-1061 and includes the amino acid replacement.

[0088] In some examples, the modified anti-EGFR antibodies, or antigen-binding fragments thereof, include: a) a variable heavy (VH) chain set forth in any of SEQ ID NOS: 31-32, 35-57, 59-85, 87-112, 114-125, 127-131, 133-134, 138-139, 141-149, 148-168, 170, 174, 176-177, 180, 182, 186-189, 191-198, 200, 202-205, 207-210, 212-216, 218, 220-224, 226, 228-236, 238-240, 243, 246, 250-251, 253, 255, 257-268, 270-277, 279-283, 285-292, 294-322, 324-336, 338-352, 355-359, 361-366, 368-394, 396-402, 404-448, 450-465, 467-477, 479, 481-483, 485-487, 489-505, 507-510, 512-523, 525-557, 1062, 1063, 1093, 1098-1107 and 1112-1113 or a sequence of amino acids that exhibits at least 75% sequence identity to any of SEQ ID NOS: 31-32, 35-57, 59-85, 87-112, 114-125, 127-131, 133-134, 138-139, 141-149, 148-168, 170, 174, 176-177, 180, 182, 186-189, 191-198, 200, 202-205, 207-210, 212-216, 218, 220-224, 226, 228-236, 238-240, 243, 246, 250-251, 253, 255, 257-268, 270-277, 279-283, 285-292, 294-322, 324-336, 338-352, 355-359, 361-366, 368-394, 396-402, 404-448, 450-465, 467-477, 479, 481-483, 485-487, 489-505, 507-510, 512-523, 525-557, 1062, 1063, 1093, 1098-1107 and 1112-1113 and includes the amino acid replacement; and b) a variable light (VL) chain set forth in SEQ ID NO:4 or SEQ ID NO:10, or a sequence of amino acids that exhibits at least 75% sequence identity to SEQ ID NO:4 or SEQ ID NO:10.

[0089] In some examples, the modified anti-EGFR antibodies, or antigen-binding fragments thereof, include: a) a variable heavy (VH) chain set forth in SEQ ID NO:3 or a sequence of amino acids that exhibits at least 75% sequence identity to SEQ ID NO:3; and b) a variable light chain (VL) set forth in any of SEQ ID NOS: 558, 560-565, 568-570, 572-583, 585-603, 605, 608-609, 611-621, 624-627, 629-641, 643, 645, 647, 649-650, 652, 656-660, 662-678, 680-685, 687-733, 735-741, 743, 745-751, 753, 756-759, 764-768, 775, 778-809, 810, 812-817, 820-822, 824-835, 837-855, 857, 860-861, 863-873, 876-879, 881-893, 895, 897, 899, 901-902, 904, 908-912, 914-930, 932-937, 939-985, 987-993, 995, 997-1003, 1005, 1008-1011, 1016-1020, 1027, 1030-1061, or a sequence of amino acids that exhibits at least 75% sequence identity to any of SEQ ID NOS: 558, 560-565, 568-570, 572-583, 585-603, 605, 608-609, 611-621, 624-627, 629-641, 643, 645, 647, 649-650, 652, 656-660, 662-678, 680-685, 687-733, 735-741, 743, 745-751, 753, 756-759, 764-768, 775, 778-809, 810, 812-817, 820-822, 824-835, 837-855, 857, 860-861, 863-873, 876-879, 881-893, 895, 897, 899, 901-902, 904, 908-912, 914-930, 932-937, 939-985, 987-993, 995, 997-1003, 1005, 1008-1011, 1016-1020, 1027, 1030-1061 and includes the amino acid replacement.

[0090] In particular examples herein of a conditionally active anti-EGFR antibodies, including modified anti-EGFR antibodies, containing an amino acid replacement corresponding to Y104D in the heavy chain and exhibiting a ratio of binding activity of at least 2.0 as described herein, the modified anti-EGFR antibody, or antigen-binding fragment thereof, contains: a variable heavy (VH) chain having the sequence of amino acids set forth in SEQ ID NO:495, 1062, 1112, 1114, 1115, 1116, 1117, 1118, 1119, 1124, 1125, 1126, 1127, 1128, 1129, 1130 or 1131, or a sequence of amino acids that exhibits at least 85% sequence identity to any of SEQ ID NOS: 495, 1062, 1112, 1114, 1115, 1116, 1117, 1118, 1119, 1124, 1125, 1126, 1127, 1128, 1129, 1130 or 1131; and a variable light (VL) chain comprising the sequence of amino acids set forth in SEQ ID NO:4 or 10, or a sequence of amino acids that exhibits at least 85% sequence identity to SEQ ID NO:4 or 10. For example, the modified anti-EGFR antibody, or antigen-binding fragment thereof, contains a variable heavy (VH) chain containing the sequence of amino acids set forth in SEQ ID NO:1062 or 1125, or a sequence of amino acids that exhibits at least 85% sequence identity to any of SEQ ID NOS: 1062 or 1125; and a variable light (VL) chain comprising the sequence of amino acids set forth in SEQ ID NO:4 or 10, or a sequence of amino acids that exhibits at least 85% sequence identity to SEQ ID NO:4 or 10.

[0091] In any of the examples herein, that anti-EGFR, or antigen-binding fragment thereof, is humanized. Typically, in such examples, the anti-EGFR, or antigen-binding fragment thereof, retains the conditional activity and exhibits a ratio of activity in a tumor microenvironment compared to a non-tumor microenvironment of at least 2.0, and generally at least 3.0 or higher. In some cases of a humanized antibody provided herein, the variable heavy chain exhibits less than 85% sequence identity to the variable heavy chain set forth in SEQ ID NO:3 and greater than 65% sequence identity to the variable heavy chain set forth in SEQ ID NO:3; and the variable light chain exhibits less than 85% sequence identity to the variable light chain set forth in SEQ ID NO:4 and greater than 65% sequence identity to the variable light chain set forth in SEQ ID NO:4. Exemplary of such antibodies are any that contain the sequence of amino acids of:

[0092] a) the variable heavy chain set forth in SEQ ID NO:1134 or a sequence of amino acids that exhibits at least 85% sequence identity to SEQ ID NO:1134, and the variable light chain set forth in SEQ ID NO:1138 or a sequence of amino acids that exhibits at least 85% sequence identity to SEQ ID NO:1138;

[0093] b) the variable heavy chain set forth in SEQ ID NO:1134 or a sequence of amino acids that exhibits at least 85% sequence identity to SEQ ID NO:1134, and the variable light chain set forth in SEQ ID NO:1139 or a sequence of amino acids that exhibits at least 85% sequence identity to SEQ ID NO:1139;

[0094] c) the variable heavy chain set forth in SEQ ID NO:1135 or a sequence of amino acids that exhibits at least 85% sequence identity to SEQ ID NO:1135, and the variable light chain set forth in SEQ ID NO:1138 or a sequence of amino acids that exhibits at least 85% sequence identity to SEQ ID NO:1138;

[0095] d) the variable heavy chain set forth in SEQ ID NO:1134 or a sequence of amino acids that exhibits at least 85% sequence identity to SEQ ID NO:1134, and the variable light chain set forth in SEQ ID NO:1140 or a sequence of amino acids that exhibits at least 85% sequence identity to SEQ ID NO:1140;

[0096] e) the variable heavy chain set forth in SEQ ID NO:1134 or a sequence of amino acids that exhibits at least 85% sequence identity to SEQ ID NO:1134, and the variable light chain set forth in SEQ ID NO:1141 or a sequence of amino acids that exhibits at least 85% sequence identity to SEQ ID NO:1141;

[0097] f) the variable heavy chain set forth in SEQ ID NO:1134 or a sequence of amino acids that exhibits at least 85% sequence identity to SEQ ID NO:1134, and the variable light chain set forth in SEQ ID NO:1142 or a sequence of amino acids that exhibits at least 85% sequence identity to SEQ ID NO:1142;

[0098] g) the variable heavy chain set forth in SEQ ID NO:1135 or a sequence of amino acids that exhibits at least 85% sequence identity to SEQ ID NO:1135, and the variable light chain set forth in SEQ ID NO:1142 or a sequence of amino acids that exhibits at least 85% sequence identity to SEQ ID NO:1142;

[0099] h) the variable heavy chain set forth in SEQ ID NO:1134 or a sequence of amino acids that exhibits at least 85% sequence identity to SEQ ID NO:1134, and the variable light chain set forth in SEQ ID NO:1143 or a sequence of amino acids that exhibits at least 85% sequence identity to SEQ ID NO:1143;

[0100] i) the variable heavy chain set forth in SEQ ID NO:1136 or a sequence of amino acids that exhibits at least 85% sequence identity to SEQ ID NO:1136, and the variable light chain set forth in SEQ ID NO:1142 or a sequence of amino acids that exhibits at least 85% sequence identity to SEQ ID NO:1142;

[0101] j) the variable heavy chain set forth in SEQ ID NO:1137 or a sequence of amino acids that exhibits at least 85% sequence identity to SEQ ID NO:1137, and the variable light chain set forth in SEQ ID NO:1144 or a sequence of amino acids that exhibits at least 85% sequence identity to SEQ ID NO:1144;

[0102] k) the variable heavy chain set forth in SEQ ID NO:1136 or a sequence of amino acids that exhibits at least 85% sequence identity to SEQ ID NO:1136, and the variable light chain set forth in SEQ ID NO:1144 or a sequence of amino acids that exhibits at least 85% sequence identity to SEQ ID NO:1144;

[0103] l) the variable heavy chain set forth in SEQ ID NO:1137 or a sequence of amino acids that exhibits at least 85% sequence identity to SEQ ID NO:1137, and the variable light chain set forth in SEQ ID NO:1145 or a sequence of amino acids that exhibits at least 85% sequence identity to SEQ ID NO:1145;

[0104] m) the variable heavy chain set forth in SEQ ID NO:1136 or a sequence of amino acids that exhibits at least 85% sequence identity to SEQ ID NO:1136, and the variable light chain set forth in SEQ ID NO:1145 or a sequence of amino acids that exhibits at least 85% sequence identity to SEQ ID NO:1145;

[0105] n) the variable heavy chain set forth in SEQ ID NO:1146 or a sequence of amino acids that exhibits at least 85% sequence identity to SEQ ID NO:1146, and the variable light chain set forth in SEQ ID NO:1153 or a sequence of amino acids that exhibits at least 85% sequence identity to SEQ ID NO:1153;

[0106] o) the variable heavy chain set forth in SEQ ID NO:1147 or a sequence of amino acids that exhibits at least 85% sequence identity to SEQ ID NO:1147, and the variable light chain set forth in SEQ ID NO:1153 or a sequence of amino acids that exhibits at least 85% sequence identity to SEQ ID NO:1153;

[0107] p) the variable heavy chain set forth in SEQ ID NO:1148 or a sequence of amino acids that exhibits at least 85% sequence identity to SEQ ID NO:1148, and the variable light chain set forth in SEQ ID NO:1154 or a sequence of amino acids that exhibits at least 85% sequence identity to SEQ ID NO:1154;

[0108] q) the variable heavy chain set forth in SEQ ID NO:1149 or a sequence of amino acids that exhibits at least 85% sequence identity to SEQ ID NO:1149, and the variable light chain set forth in SEQ ID NO:1154 or a sequence of amino acids that exhibits at least 85% sequence identity to SEQ ID NO:1154;

[0109] r) the variable heavy chain set forth in SEQ ID NO:1150 or a sequence of amino acids that exhibits at least 85% sequence identity to SEQ ID NO:1150, and the variable light chain set forth in SEQ ID NO:1155 or a sequence of amino acids that exhibits at least 85% sequence identity to SEQ ID NO:1155;

[0110] s) the variable heavy chain set forth in SEQ ID NO:1151 or a sequence of amino acids that exhibits at least 85% sequence identity to SEQ ID NO:1151, and the variable light chain set forth in SEQ ID NO:1156 or a sequence of amino acids that exhibits at least 85% sequence identity to SEQ ID NO:1156;

[0111] t) the variable heavy chain set forth in SEQ ID NO:1146 or 1148 or a sequence of amino acids that exhibits at least 85% sequence identity to SEQ ID NO:1146 or 1148, and the variable light chain set forth in SEQ ID NO:1156 or a sequence of amino acids that exhibits at least 85% sequence identity to SEQ ID NO:1156;

[0112] u) the variable heavy chain set forth in SEQ ID NO:1149 or a sequence of amino acids that exhibits at least 85% sequence identity to SEQ ID NO:1149, and the variable light chain set forth in SEQ ID NO:1156 or a sequence of amino acids that exhibits at least 85% sequence identity to SEQ ID NO:1156;

[0113] v) the variable heavy chain set forth in SEQ ID NO:1150 or a sequence of amino acids that exhibits at least 85% sequence identity to SEQ ID NO:1150, and the variable light chain set forth in SEQ ID NO:1157 or a sequence of amino acids that exhibits at least 85% sequence identity to SEQ ID NO:1157;

[0114] w) the variable heavy chain set forth in SEQ ID NO:1152 or a sequence of amino acids that exhibits at least 85% sequence identity to SEQ ID NO:1152, and the variable light chain set forth in SEQ ID NO:1157 or a sequence of amino acids that exhibits at least 85% sequence identity to SEQ ID NO:1157;

[0115] x) the variable heavy chain set forth in SEQ ID NO:1148 or a sequence of amino acids that exhibits at least 85% sequence identity to SEQ ID NO:1148, and the variable light chain set forth in SEQ ID NO:1157 or a sequence of amino acids that exhibits at least 85% sequence identity to SEQ ID NO:1157;

[0116] y) the variable heavy chain set forth in SEQ ID NO:1149 or a sequence of amino acids that exhibits at least 85% sequence identity to SEQ ID NO:1149, and the variable light chain set forth in SEQ ID NO:1157 or a sequence of amino acids that exhibits at least 85% sequence identity to SEQ ID NO:1157;

[0117] z) the variable heavy chain set forth in SEQ ID NO:1150 or a sequence of amino acids that exhibits at least 85% sequence identity to SEQ ID NO:1150, and the variable light chain set forth in SEQ ID NO:1186 or a sequence of amino acids that exhibits at least 85% sequence identity to SEQ ID NO:1186;

[0118] aa) the variable heavy chain set forth in SEQ ID NO:1152 or a sequence of amino acids that exhibits at least 85% sequence identity to SEQ ID NO:1152, and the variable light chain set forth in SEQ ID NO:1186 or a sequence of amino acids that exhibits at least 85% sequence identity to SEQ ID NO:1186;

[0119] bb) the variable heavy chain set forth in SEQ ID NO:1148 or a sequence of amino acids that exhibits at least 85% sequence identity to SEQ ID NO:1148, and the variable light chain set forth in SEQ ID NO:1186 or a sequence of amino acids that exhibits at least 85% sequence identity to SEQ ID NO:1186;

[0120] cc) the variable heavy chain set forth in SEQ ID NO:1149 or a sequence of amino acids that exhibits at least 85% sequence identity to SEQ ID NO:1149, and the variable light chain set forth in SEQ ID NO:1186 or a sequence of amino acids that exhibits at least 85% sequence identity to SEQ ID NO:1186;

[0121] dd) the variable heavy chain set forth in SEQ ID NO:1150 or a sequence of amino acids that exhibits at least 85% sequence identity to SEQ ID NO:1150, and the variable light chain set forth in SEQ ID NO:1158 or a sequence of amino acids that exhibits at least 85% sequence identity to SEQ ID NO:1158;

[0122] ee) the variable heavy chain set forth in SEQ ID NO:1152 or a sequence of amino acids that exhibits at least 85% sequence identity to SEQ ID NO:1152, and the variable light chain set forth in SEQ ID NO:1159 or a sequence of amino acids that exhibits at least 85% sequence identity to SEQ ID NO:1159;

[0123] ff) the variable heavy chain set forth in SEQ ID NO:1146 or a sequence of amino acids that exhibits at least 85% sequence identity to SEQ ID NO:1146, and the variable light chain set forth in SEQ ID NO:1159 or a sequence of amino acids that exhibits at least 85% sequence identity to SEQ ID NO:1159;

[0124] gg) the variable heavy chain set forth in SEQ ID NO:1146 or a sequence of amino acids that exhibits at least 85% sequence identity to SEQ ID NO:1146, and the variable light chain set forth in SEQ ID NO:1157 or a sequence of amino acids that exhibits at least 85% sequence identity to SEQ ID NO:1157; and

[0125] hh) the variable heavy chain set forth in SEQ ID NO:1146 or a sequence of amino acids that exhibits at least 85% sequence identity to SEQ ID NO:1146, and the variable light chain set forth in SEQ ID NO:1186 or a sequence of amino acids that exhibits at least 85% sequence identity to SEQ ID NO:1186.

[0126] In any of the examples provided herein, the conditionally active anti-EGFR antibodies, including modified anti-EGFR antibodies, are full-length IgG antibodies. For example, the conditionally active anti-EGFR antibodies, including modified anti-EGFR antibody, can include a heavy chain constant region set forth in any of SEQ ID NOS:22-25, 1069 and 1070, or a variant thereof that exhibits at least 75% sequence identity thereto; and a light chain constant region set forth in any of SEQ ID NOS: 1072-1073, or a variant thereof that exhibits at least 75% sequence identity thereto.

[0127] In any of the examples of the conditionally active anti-EGFR antibodies provided herein, including modified anti-EGFR antibodies and antigen-binding fragments provided herein, the antigen-binding fragment can be selected from among a Fab, Fab′, F(ab′)₂, single-chain Fv (scFv), Fv, dsFv, diabody, Fd and Fd′ fragments. In some examples, the conditionally active anti-EGFR antibody, such as a modified anti-EGFR antibody or antigen-binding fragment, is a Fab or scFv.

[0128] In any of the examples herein, a sequence of amino acids provided herein that exhibits sequence identity to a reference sequence or SEQ ID NO, such as, for example, a sequence of amino acids in a modified anti-EGFR antibody or an unmodified cetuximab, exhibits at least 80%, 81%, 82%, 83%, 84%, 85%, 86%, 87%, 88%, 89%, 90%, 91%, 92%, 93%, 94%, 95%, 96%, 97%, 98%, or 99% sequence identity thereto. Sequence identity can be determined using global alignment with or without gaps.

[0129] In any of the examples of conditionally active anti-EGFR antibodies provided herein, including a modified anti-EGFR antibody, or antigen binding fragment, the antibody or antigen-binding fragment also can include an amino acid replacement selected from among: a) an amino acid replacement(s) in the variable heavy chain corresponding to an amino acid replacement(s) selected from among replacement of Glutamine (Q) at position 1 with Glutamic acid (E), Q1C, V2C, Q3T, Q3C, L4C, K5Q, K5V, K5L, K5C, Q6E, Q6C, S7C, G8C, P9A, P9G, P9C, G10V, G10C, LUC, V12C, Q13K, Q13R, Q13C, P14C, S15G, S15T, S15C, Q16G, Q16R, Q16E, Q16C, S17T, S17C, L18C, S19K, S19R, S19T, S19C, I20L, I20C, T21S, T21C, T23A, T23K, T23C, V24A, V24C, S25C, F27G, S28N, S28T, L29I, T30S, T30K, N31V, N31D, N31I, N31T, N32S, Y32R, Y32W, G33A, G33D, G33E, G33Y, V34L, V34N, V34E, V34Q, V34S, V34W, H35S, V371, S40A, S40P, P41T, G44A, L48V, L48I, G49S, G49A, V50L, V50Q, V50E, V50I, V50Y, V50N, I51G, I51M, I51S, I51Q, I51A, I51C, I51V, W52F, W52Y, W52G, W52T, S53Q, S53T, S53N, S53Y, G54A, G54V, G54L, G54I, G54S, G55D, G55A, G55E, G55H, G55F, N56A, N56G, N56S, N56T, T57A, T57D, T57G, T57S, T57E, T57P, D58Y, D58N, Y59A, Y59C, Y59E, Y59F, Y59G, Y59S, Y59W, T59H, Y59P, Y59Q, N60D, N60A, T61E, T61P, P62S, F63L, F63V, T64K, T64E, T64A, T64N, T64D, S65G, L67F, L67V, S68T, N70S, N70T, K71V, D72E, N73T, S74A, S76N, Q77T, Q77S, V78L, V78F, V78A, F79Y, F79S, F79V, F80L, F80M, K81Q, K81T, K81E, K81Q, M82L, N83T, N83S, S84N,

[0130] L85M, L85V, Q86R, Q86D, Q86T, S87A, S87P, N88E, N88V, N88G, N88A, N88D, I92T, I92V, A96C, R97c, A98C, L99C, L99E, T100D, T100C, T100A, Y101C, Y101W, Y101A, Y102C, Y102F, Y102A, Y102W, D103E, D103P, D103C, Y104C, E105C, E105N, E105D, E105Y, F106C, F106D, F106Y, A107C, A107D, Y108C and Y108F, with reference to amino acid positions set forth in SEQ ID NO:1 or 3, and corresponding amino acid positions are identified by alignment of the VH chain of the antibody with the VH chain set forth in SEQ ID NO:3; and/or b) an amino acid replacement(s) in the variable light chain corresponding to an amino acid replacement selected from among replacement of Aspartate (D) at position 1 with Glutamate (E), D1C, 12T, 12C, L3V, L3T, L3C, L4C, T5C, Q6C, S7C, P8C, V9C, V9A, V9D, V9G, V9P, V9S, I10T, I10S, I10F, I10C, L11Q, L11C, S12A, S12C, V13L, V13M, V13S, V13A, V13C, S14T, S14C, P15V, P15L, P15C, G16K, G16C, E17D, E17K, E17C, R18V, R18K, R18c, V19A, V19T, V19C, S20T, S20C, S20A, F21I, F21L, F21C, S22T, S22C, R24P, A25V, A25S, A25I, A25P, A25T, A25Y, A25C, A25F, A25M, A25L, A25W, S26D, Q27W, Q27E, Q27F, Q27Y, Q27T, Q27H, S28R, S28F, G30Y, G30C, G30H, G30K, G30Q, G30R, G30W, G30F, G30T, G30M, G30S, G30A, T31E, T31V, T31D, T31R, N32H, I33L, H34C, Q38K, R39K, T40P, T40S, N41G, N41D, G42Q, G42K, G42E, S43A, S43P, R45K, K49Y, K49F, Y50G, S53V, S60D, S60A, G64S, G64A, D70E, D70V, F71Y, S74T, N76S, N76T, S77R, S77G, V78L, E79Q, S80P, S80A, E81A, I83F, I83S, I83V, I83A, D85V, D85T, D85I, D85M, Y87S, Q89C, Q89H, Q90C, N91C, N91Q, N91L, N92C, N92L, N92R N92K, N92M, N92Y, N92H, N92E, N92F, N93A, N93D, N93E, N93V, N93K, N93C, W94F, W94Y, P95C, T96C, T96L, T96E, T97C, T97A, T97D, T97E, T97P, T97K, T97N, T97Q, T97I, T97G, T97L, T97H, T97R, T97S, G99A, A100G, A100Q, K103T, L104V and L106I, with reference to amino acid positions set forth in SEQ ID NO:2 or 4, and corresponding amino acid positions are identified by alignment of the VL chain of the antibody with the VL chain set forth in SEQ ID NO:4; and/or c) amino acid replacements in the heavy chain constant regions selected from among replacement of Proline (P) at position 230 with Alanine (A), E233D, L234D, L234E, L234N, L234Q, L234T, L234H, L234Y, L234I, L234V, L234F, L235D, L235S, L235N, L235Q, L235T, L235H, L235Y, L235I, L235V, L235F, S239D, S239E, S239N, S239Q, S239F, S239T, S239H, S239Y, V240I, V240A, V240T, V240M, F241W, F241L, F241Y, F241E, F241R, F243W, F243L F243Y, F243R, F243Q, P244H, P245A,

[0131] P247V, P247G, V262I, V262A, V262T, V262E, V263I, V263A, V263T, V263M, V264L, V264I, V264W, V264T, V264R, V264F, V264M, V264Y, V264E, D265G, D265N, D265Q, D265Y, D265F, D265V, D265I, D265L, D265H, D265T, V266I, V266A, V266T, V266M, S267Q, S267L, S267T, S267H, S267D, 5267N, E269H, E269Y, E269F, E269R, E269T, E269L, E269N, D270Q, D270T, D270H, E272S, E272K, E272I, E272Y, V273I, K274T, K274E, K274R, K274L, K274Y, F275W, N276S, N276E, N276R, N276L, N276Y, Y278T, Y278E, Y278K, Y278W, E283R, Y296E, Y296Q, Y296D, Y296N, Y296S, Y296T, Y296L, Y296I, Y296H, N297S, N297D, N297E, A298H, T299I, T299L, T299A, T299S, T299V, T299H, T299F, T299E, V302I, W313F, E318R, K320T, K320D, K320I, K322T, K322H, V323I, S324T, S324D, S324R, S324I, S324V, S324L, S324Y, N325Q, N325L; N325I, N325D, N325E, N325A, N325T, N325V, N325H, K326L, K326I, K326T, A327N, A327L, A327D, A327T, L328M, L328D, L328E, L328N, L328Q, L328F, L328I, L328V, L328T, L328H, L328A, P329F, A330L, A330Y, A330V, A330I, A330F, A330R, A330H, A330S, A330W, A330M, P331V, P331H, I332D, I332E, I332N, I332Q, I332T, I332H, I332Y, I332A, E333T, E333H, E333I, E333Y, K334I, K334T, K334F, T335D, T335R, T335Y, D221K, D221Y, K222E, K222Y, T223E, T223K, H224E, H224Y, T225E, T225E, T225K, T225W, P227E, P227K, P227Y, P227G, P228E, P228K, P228Y, P228G, P230E, P230Y, P230G, A231E, A231K, A231Y, A231P, A231G, P232E, P232K, P232Y, P232G, E233N, E233Q, E233K, E233R, E233S, E233T, E233H, E233A, E233V, E233L, E233I, E233F, E233M, E233Y, E233W, E233G, L234K, L234R, L234S, L234A, L234M, L234W, L234P, L234G, L235E, L235K, L235R, L235A, L235M, L235W, L235P, L235G, G236D, G236E, G236N, G236Q, G236K, G236R, G236S, G236T, G236H, G236A, G236V, G236L, G236I, G236F, G236M, G236Y, G236W, G236P, G237D, G237E, G237N, G237Q, G237K, G237R, G237S, G237T, G237H, G237V, G237L, G237I, G237F, G237M, G237Y, G237W, G237P, P238D, P238E, P238N, P238Q, P238K, P238R, P238S, P238T, P238H, P238V, P238L, P238I, P238F, P238M, P238Y, P238W, P238G, S239Q, S239K, S239R, S239V, S239L, S239I, S239M, S239W, S239P, S239G, F241D, F241E, F241Y, F243E, K246D, K246E, K246H, K246Y, D249Q, D249H, D249Y, R255E, R255Y, E258S, E258H, E258Y, T260D, T260E, T260H, T260Y, V262E, V262F, V264D, V264E, V264N, V264Q, V264K, V264R, V264S, V264H, V264W, V264P, V264G, D265Q, D265K, D265R, D265S, D265T, D265H, D265V, D265L, D265I, D265F, D265M, D265Y, D265W, D265P, S267E, S267Q, S267K, S267R, S267V, S267L, S267I, S267F, S267M, S267Y, S267W, S267P, H268D, H268E, H268Q, H268K, H268R, H268T, H268V, H268L, H268I, H268F, H268M, H268W, 1-I268P, H268G, E269K, E269S, E269V, E269I, E269M, E269W, E269P, E269G, D270R, D270S, D270L, D270I, D270F, D270M, D270Y, D270W, D270P, D270G, P271D, P271E, P271N, P271Q, P271K, P271R, P271S, P271T, P271H, P271A, P271V, P271L, P271I, P271F, P271M, P271Y, P271W, P271G, E272D, E272R, E272T, E272H, E272V, E272L, E272F, E272M, E272W, E272P, E272G, K274D, K274N, K274S, K274H, K274V, K274I, K274F, K274M, K274W, K274P, K274G, F275L, N276D, N276T, N276H, N276V, N276I, N276F, N276M, N276W, N276P, N276G, Y278D, Y278N, Y278Q, Y278R, Y278S, Y278H, Y278V, Y278L, Y278I, Y278M, Y278P, Y278G, D280K, D280L, D280W, D280P, D280G, G281D, G281K, G281Y, G281P, V282E, V282K, V282Y, V282P, V282G, E283K, E283H, E283L, E283Y, E283P, E283G, V284E, V284N, V284T, V284L, V284Y, H285D, H285E, H285Q, H285K, H285Y, H285W, N286E, N286Y, N286P, N286G, K288D, K288E, K288Y, K290D, K290N, K290H, K290L, K290W, P291D, P291E, P291Q, P291T, P291H, P291I, P291G, R292D, R292E, R292T, R292Y, E293N, E293R, E293S, E293T, E293H, E293V, E293L, E293I, E293F, E293M, E293Y, E293W, E293P, E293G, E294K, E294R, E294S, E294T, E294H, E294V, E294L, E294I, E294F, E294M, E294Y, E294W, E294P, E294G, Q295D, Q295E, Q295N, Q295R, Q295S, Q295T, Q295H, Q295V, Q295I, Q295F, Q295M, Q295Y, Q295W, Q295P, Q295G, Y296K, Y296R, Y296A, Y296V, Y296M, Y296G, N297Q, N297K, N297R, N297T, N297H, N297V, N297L, N297I, N297F, N297M, N297Y, N297W, N297P, N297G, S298D, S298E, S298Q, S298K, S298R, S298I, S298F, S298M, S298Y, S298W, T299D, T299E, T299N, T299Q, T299K, T299R, T299L, T299F, T299M, T299Y, T299W, T299P, T299G, Y300D, Y300E, Y300N, Y300Q, Y300K, Y300R, Y300S, Y300T, Y300H, Y300A, Y300V, Y300M, Y300W, Y300P, Y300G, R301D, R301E, R301H, R301Y, V303D, V303E, V303Y, S304D, S304N, S304T, S304H, S304L, V305E, V305T, V305Y, K317E, K317Q, E318Q, E318H, E318L, E318Y, K320N, K320S, K320H, K320V, K320L, K320F, K320Y, K320W, K320P, K320G, K322D, K322S, K322V, K322I, K322F, K322Y, K322W, K322P, K322G, S324H, S324F, S324M, S324W, S324P, S324G, N325K, N325R, N325S, N325F, N325M, N325Y, N325W, N325P, N325G, K326P, A327E, A327K, A327R, A327H, A327V, A327I, A327F, A327M, A327Y, A327W, A327P, L328D, L328Q, L328K, L328R, L328S, L328T, L328V, L328I, L328Y, L328W, L328P, L328G, P329D, P329E, P329N, P329Q, P329K, P329R, P329S, P329T, P329H, P329V, P329L, P329I, P329M, P329Y, P329W, P329G, A330E, A330N, A330T, A330P, A330G, P331D, P331Q, P331R, P331T, P331L, P331I, P331F, P331M, P331Y, P331W, I332K, I332R, I332S, I332V, I332F, I332M, I332W, I332P, I332G, E333L, E333F, E333M, E333P, K334P, T335N, T335S, T335H, T335V, T335L, T335I, T335F, T335M, T335W, T335P, T335G, I336E, I336K, I336Y, S337E, S337N, S337H, S298A, K326A, K326S, K326N, K326Q, K326D, K325E, K326W, K326Y, E333A, E333S, K334A, K334E, Y300I, Y300L, Q295K, E294N, S298N, S298V, S298D, D280H, K290S, D280Q, D280Y, K290G, K290T, K290Y, T250Q, T250E, M428L, M428F, S239D, S239E, S239N, S239Q, S239T, V240I, V240M, V264I, V264T, V264Y, E272Y, K274E, Y278T, 297D, T299A, T299V, T299I, T299H, K326T, L328A,

[0132] L328H, A330Y, A330L, A3301, I332D, I332E, I332N, and I332Q, according to EU index numbering.

[0133] Any of the examples of an anti-EGFR antibody, or antigen-binding fragment thereof, provided herein can immunospecifically bind to EGFR. Also provided herein are conjugates containing any of the anti-EGFR antibody, or antigen-binding fragment thereof, provided herein linked directly or indirectly to a targeted agent. The conjugate can contain the following components: (Ab), (L)_{q}, and (targeted agent)ₘ, wherein:

[0134] Ab is the anti-EGFR antibody or antigen-binding fragment thereof that binds to EGFR;

[0135] L is a linker for linking the Ab to the targeted agent;

[0136] m is at least 1, such as at least 1 to 8;

[0137] q is 0 or more, such as 0 to 8, as long as the resulting conjugate binds to the EGFR; and

[0138] the resulting conjugate binds to the EGFR.

[0139] In examples of any of the conjugates provided herein the targeted agent can be a protein, peptide, nucleic acid or small molecule. For example, the targeted agent is a therapeutic moiety. The therapeutic moiety can be a cytotoxic moiety, a radioisotope, a chemotherapeutic agent, a lytic peptide or a cytokine. Non-limiting examples of a therapeutic moiety in a conjugate herein can be a taxol; cytochalasin B; gramicidin D; ethidium bromide; emetine; mitomycin; etoposide; tenoposide; vincristine; vinblastine; colchicin; doxorubicin; daunorubicin; dihydroxy anthracin dione; maytansine or an analog or derivative thereof; an auristatin or a functional peptide analog or derivative thereof; dolastatin 10 or 15 or an analogue thereof; irinotecan or an analogue thereof; mitoxantrone; mithramycin; actinomycin D; 1-dehydrotestosterone; a glucocorticoid; procaine; tetracaine; lidocaine; propranolol; puromycin; calicheamicin or an analog or derivative thereof; an antimetabolite; an alkylating agent; a platinum derivative; duocarmycin A, duocarmycin SA, rachelmycin (CC-1065), or an analog or derivative thereof; an antibiotic; pyrrolo[2,1-e][1, 4]-benzodiazepines (PDB); a toxin; ribonuclease (RNase); DNase I, Staphylococcal enterotoxin A; or pokeweed antiviral protein.

[0140] For example, the therapeutic moiety is a maytansine derivative that is a maytansinoids selected from among ansamitocin or mertansine (DM1). In another example, the therapeutic moiety is an auristatin or a functional peptide analog or derivative thereof that is monomethyl auristatin E (MMAE) or F (MMAF). In another example, the therapeutic moiety is an antimetabolite selected from among methotrexate, 6 mercaptopurine, 6 thioguanine, cytarabine, fludarabin, 5 fluorouracil, decarbazine, hydroxyurea, asparaginase, gemcitabine, and cladribine. In another example, the therapeutic moiety is an alkylating agent selected from among mechlorethamine, thioepa, chlorambucil, melphalan, carmustine (BSNU), lomustine (CCNU), cyclophosphamide, busulfan, dibromomannitol, streptozotocin, dacarbazine (DTIC), procarbazine and mitomycin C. In another example, the therapeutic moiety is a platinum derivative that is cisplatin or carboplatin. In another example, the therapeutic moiety is an antibiotic selected from among dactinomycin, bleomycin, daunorubicin, doxorubicin, idarubicin, mithramycin, mitomycin, mitoxantrone, plicamycin and anthramycin (AMC). In another example, the therapeutic moiety is a toxin selected from among a diphtheria toxin and active fragments thereof and hybrid molecules, a ricin toxin, cholera toxin, a Shiga-like toxin, LT toxin, C3 toxin, Shiga toxin, pertussis toxin, tetanus toxin, soybean Bowman-Birk protease inhibitor, Pseudomonas exotoxin, alorin, saporin, modeccin, gelanin, abrin A chain, modeccin A chain, alpha-sarcin, Aleurites fordii proteins, dianthin proteins, Phytolacca americana proteins, momordica charantia inhibitor, curcin, crotin, gelonin, mitogellin, restrictocin, phenomycin, and enomycin toxins.

[0141] In any of the examples of conjugates provided herein, the antibody and targeted agent are linked directly. For example, the antibody and targeted agent are joined via a linker. The linker can be a peptide or a polypeptide or is a chemical linker. The linker can be a cleavable linker or a non-cleavable linker. The linker can be conjugated to one or more free thiols on the antibody or can be conjugated to one or more primary amines.

[0142] Provided herein are nucleic acid molecules that include a sequence of nucleotides encoding one or more heavy chain(s) of a conditionally active anti-EGFR antibody or antigen-binding fragment thereof, such as a modified anti-EGFR antibody or antigen-binding fragment thereof, provided herein. Also provided herein are nucleic acid molecules that include a sequence of nucleotides encoding one or more light chain(s) of a conditionally active anti-EGFR antibodies or antigen-binding fragment thereof, such as a modified anti-EGFR antibody or antigen-binding fragment thereof, provided herein. Also provided herein are vectors that include the nucleic acid molecules provided herein, and cells that include the vectors provided herein. Examples of cells provided herein include prokaryotic and eukaryotic cells.

[0143] Provided herein are combinations that include a conditionally active anti-EGFR antibody or antigen-binding fragment thereof, such as a modified anti-EGFR antibody or antigen-binding fragment provided herein, and a chemotherapeutic agent. A chemotherapeutic agent can be selected from among alkylating agents, nitrosoureas, topoisomerase inhibitors, and antibodies. In some examples, a chemotherapeutic agent is an additional anti-EGFR antibody or antigen-binding fragment thereof that differs from the first antibody. In some examples, the additional anti-EGFR antibody is selected from among cetuximab, panitumumab, nimotuzumab, and antigen-binding fragments thereof or variants thereof.

[0144] Provided herein are kits that include an antibody or antigen-binding fragment provided herein, or a combination provided herein, in one or more containers, and instructions for use.

[0145] Provided herein are pharmaceutical compositions that include any of the conditionally active anti-EGFR antibodies or antigen-binding fragments provided herein, such as any of the modified anti-EGFR antibody or antigen-binding fragment provided herein, and a pharmaceutically acceptable carrier or excipient. The pharmaceutical compositions also can include any of the combinations provided herein that include the antibody or antigen-binding fragment provided herein and an additional agent or agents. A pharmaceutical composition provided herein can be formulated as a gel, ointment, liquid, suspension, aerosol, tablet, pill or powder and/or can formulated for systemic, parenteral, topical, oral, mucosal, intranasal, subcutaneous, aerosolized, intravenous, bronchial, pulmonary, vaginal, vulvovaginal, esophageal, or oroesophageal administration. A pharmaceutical composition provided herein can be formulated for single dosage administration or for multiple dosage administration. In some examples, a pharmaceutical composition provided herein is a sustained release formulation.

[0146] Provided herein are methods for treating a condition responsive to treatment with an anti-EGFR antibody. In some examples, the methods are for treating a condition responsive to treatment with an anti-EGFR antibody in a subject and include administering to the subject a pharmaceutically effective amount of any of the pharmaceutical compositions provided herein.

[0147] Also provided herein are methods for treating a condition responsive to treatment with an anti-EGFR antibody. In some examples, the methods are for treating a condition responsive to treatment with an anti-EGFR antibody in a subject and include: a) identifying a subject with a condition responsive to treatment with an anti-EGFR antibody, and the subject exhibits side-effects associated with administration of an anti-EGFR antibody; and b) administering a conditionally active anti-EGFR antibody or antigen-binding fragment thereof, such as a modified anti-EGFR antibody or an antigen-binding fragment thereof, to the subject, and the modified anti-EGFR antibody, or antigen-binding fragment thereof. In such examples, the conditionally active anti-EGFR antibody or antigen binding fragment thereof is a modified antibody that includes an amino acid replacement(s) in a variable heavy chain, variable light chain or both of the unmodified anti-EGFR antibody, and the modified anti-EGFR antibody is conditionally active in the tumor microenvironment. In some examples, the unmodified anti-EGFR antibody is cetuximab, an antigen-binding fragment thereof or a variant thereof that does not include the amino acid replacement and specifically binds to EGFR.

[0148] In the methods herein, the conditionally active anti-EGFR antibody or antigen-binding fragment thereof, such as a modified anti-EGFR antibody or antigen-binding fragment thereof, can exhibit a higher ratio of binding activity for EGFR at or about pH 6.0 to pH 6.5 compared to at or about pH 7.4, when measured under the same conditions except for the difference in pH. In the methods herein, the conditionally active anti-EGFR antibody or antigen-binding fragment thereof, such as a modified anti-EGFR antibody or antigen-binding fragment thereof, can exhibit a ratio of binding activity for EGFR at or about pH 6.0 to pH 6.5 compared to at or about pH 7.4 of at least 1.1, 1.2, 1.3, 1.4, 1.5, 1.6, 1.7, 1.8, 1.9, 2.0, 2.5, 3.0, 3.5, 4.0, 5.0 or more, when measured under the same conditions except for the difference in pH.

[0149] In some examples of the methods herein, the conditionally active anti-EGFR antibody or antigen-binding fragment thereof is a modified anti-EGFR antibody and fragment thereof that has a higher activity at a pH selected from among pH 6.0-pH 7.0 than at pH 7.4 than the unmodified antibody; or the modified anti-EGFR antibody and fragment thereof has a lower activity at a pH selected from among pH 6.0-pH 7.0 than at pH 7.4, compared to the unmodified antibody.

[0150] In the methods provided herein, for therapeutic administration, the dose of the conditionally active anti-EGFR antibody or antigen-binding fragment thereof, such as a modified anti-EGFR antibody or antigen-binding fragment thereof, can be adjusted depending upon its relative activity to the a reference or unmodified antibody in the tumor microenvironment. Hence the dosage can be lower, particularly if the reference conditionally active (e.g. modified antibody) is more active in the tumor microenvironment than the reference or unmodified antibody, higher or about the same or the same. In instances where the dosage is lower, the reduction in side-effects can result from the lower dosage. In certain aspects, conditionally active antibodies that exhibit increased selectivity to a tumor microenvironment can be administered at a higher dosage than existing similar therapeutics, resulting in increased efficacy. Dosage readily can be empirically determined by the skilled practitioner.

[0151] In any of the examples of the methods provided herein, a subject to whom the antibody or fragment thereof has been administered, is one that is identified to exhibit side-effects associated with binding of an anti-EGFR antibody to the EGFR receptor in basal keratinocytes. Side effects include, but are not limited to, for example, acneiform rash, papulopustular rash, hair growth abnormalities, dry and itchy skin and periungual inflammation with tenderness, telangiectasia, hyperpigmentation, pruritus without rash, erythema, oral aphthae, anaphylactic reactions, dyspnea, cough, wheezing, pneumonia, hypoxemia, respiratory insufficiency/failure, pulmonary embolus, pleural effusion and non-specific respiratory disorders, fever, chills, asthenia/malaise, mucosal surface problems, nausea, gastrointestinal problems, abdominal pain, headache and hypomagnesemia.

[0152] In any of the examples of practice of the methods provided herein, the conditionally active anti-EGFR antibody or antigen-binding fragment thereof is a modified anti-EGFR or antigen-binding fragment thereof. The VH chain, or a portion thereof, of the modified anti-EGFR antibody, or an antigen-binding fragment thereof, includes one or more amino acid replacement(s) corresponding to an amino acid replacement selected from among T023K, T023H, T023R, T023A, T023C, T023E, T023G, T023I, T023M, T023N, T023P, T023S, T023V, T023W, T023L, V024R, V024A, V024F, V024G, V024I, V024M, V024P, V024S, V024T, V024L, V024E, S025H, S025R, S025A, S025C, S025D, S025E, S025F, S025G, S025I, S025M, S025P, S025Q, S025T, S025V, S025L, G026H, G026R, G026D, G026F, G026M, G026N, G026P, G026Q, G026S, G026Y, G026L, F027H, F027R, F027A, F027D, F027E, F027G, F027M, F027P, F027Q, F027S, F027T, F027V, F027W, F027Y, F027L, S028K, S028H, S028R, S028A, S028D, S028I, S028M, S028P, S028Q, S028V, S028W, S028L, L029K, L029H, L029A, L029D, L029G, L029I, L029M, L029N, L029S, L029V, T030H, T030R, T030D, T030G, T030I, T030M, T030N, T030P, T030S, T030V, T030W, T030Y, N031K, N031H, N031D, N031E, N031G, N0311, N031T, N031V, N031L, Y032H, Y032R, Y032C, Y032M, Y032N, Y032T, Y032V, Y032L, G033E, G033M, G033S, G033T, G033Y, V034A, V034C, V034I, V034M, V034P, V034L, H035I, H035Q, W036K, W036A, W036I, W036V, W036Y, V050K, V050H, V050A, V050D, V050E, V050G, V050I, V050N, V050Q, V050T, V050L, I051K, I051H, I051A, I051C, I051E, I051G, I051N, I051Q, I051S, I051V, I051Y, I051L, W052I, W052N, W052Y, S053H, S053R, S053A, S053C, S053G, S053I, S053M, S053P, S053Q, S053L, S053T, S053V, S053Y, G054H, G054R, G054A, G054C, G054D, G054P, G054S, G055H, G055R, G055M, G055S, G055Y, N056K, N056A, N056P, N056S, N056V, N056G, T057H, T057R, T057L, T057A, T057C, T057D, T057F, T057M, T057N, T057Q, T057W, T057Y, D058L, D058G, D058M, D058N, D058Q, Y059H, Y059R, Y059A, Y059C, Y059D, Y059E, Y059G, Y059I, Y059P, Y059Q, Y059S, Y059T, Y059V, Y059W, N060K, N060A, N060C, N060D, N060F, N060G, N060P, N060Q, N060S, N060T, N060Y, T061N, T061Q, P062G, F063H, F063R, F063L, F063A, F063C, F063D, F063G, F063M, F063N, F063Q, F063S, F063V, T064R, T064L, T064C, T064F, T064G, T064N, T064Q, T064V, S065H, S065R, S065L, S065C, S065E, S065F, S065G, S065I, S065M, S065N, S065P, S065Q, S065T, S065W, S065Y, R066L, R066A, R066C, R066E, R066F, R066N, R066P, R066Q, R066S, R066T, R066V, R066G, L067A, L067C, L067D, L067E, L067I, L067M, L067Q, L067S, L067T, L067V, L067Y, S068K, S068H, S068R, S068L, S068C, S068D, S068E, S068F, S068G, S068I, S068N, S068Q, S068T, S068V, I069A, I069C, I069G, I069Y, N070H, N070R, N070L, N070D, N070E, N070F, N070G, N070I, N070P, N070Q, N070S, N070T, N070V, N070Y, K071H, K071R, K071L, K071A, K071C, K071F, K071G, K071Q, K071S, K071T, K071V, K071W, K071Y, D072K, D072H, D072R, D072L, D072A, D072G, D072I, D072M, D072N, D072Q, D072S, D072V, D072W, D072Y, N073H, N073R, N073L, N073A, N073C, N073G, N073I, N073M, N073P, N073Q, N073S, N073T, N073V, N073W, N073Y, S074K, S074H, S074R, S074L, S074A, S074C, S074D, S074E, S074G, S074I, S074M, S074P, S074T, S074V, S074Y, K075H, K075R, K075L, K075A, K075C, K075E, K075F, K075M, K075Q, K075T, K075V, K075W, K075Y, S076H, S076R, S076L, S076A, S076C, S076D, S076E, S076F, S076M, S076P, S076Q, S076T, S076Y, Q0771-1, Q077R, Q077L, Q077A, Q077E, Q077G, Q077I, Q077M, Q077N, Q077S, Q077V, Q077W, Q077Y, Y093H, Y093V, Y093W, Y094R, Y094L, R097H, R097W, A098P, L099N, L099W, T100H, T100L, T100A, T100D, T100I, T100N, T100P, T100Q, T100S, T100V, T100Y, Y101H, Y101E, Y101F, Y101M, Y101W, Y102R, Y102C, Y102D, Y102I, Y102N, Y102W, D103R, D103L, D103A, D103C, D103I, D103P, D103Q, D103Y, Y104H, Y104L, Y104D, Y104F, Y104I, Y104M, Y104S, Y104V, E105H, E105T, F106L, F106V, F106W, F106Y, A107K, A107H, A107R, A107L, A107C, A107D, A107E, A107G, A107N, A107S, A107T, A107Y, Y108K, Y108H, Y108R, Y108L, Y108C, Y108F, Y108I, Y108N, Y108S, Y108T, Y108V, Y108W, W109I, W109M, W109Y, G110R, G110A, G110M, G110P, G110T, Q111K, Q111H, Q111R, Q111L, Q111D, Q111E, Q111G, Q111M, Q111P, Q111S, Q111T, Q111W, Q111Y, Q111V, G112A, G112N, G112P, G112S, G112T, G112Y, Y104D/Q111P and V24E/F27R/R97H/Q111P with reference to amino acid positions set forth in SEQ ID NO: 1 or 3, corresponding amino acid positions are identified by alignment of the VH chain of the antibody with the VH chain set forth in SEQ ID NO:3 and the portion thereof is sufficient to form an antigen binding site and includes the amino acid replacement; and/or the modified VL chain, or portion thereof, includes an amino acid replacement(s) corresponding to amino acid replacement(s) selected from among D001W, I002C, I002V, I002W, L003D, L003F, L003G, L003S, L003T, L003V, L003W, L003Y, L003R, L004C, L004E, L004F, L004I, L004P, L004S, L004T, L004V, L004W, L004K, L004H, L004R, T005A, T005C, T005D, T005E, T005F, T005G, T005N, T005S, T005W, T005L, T005K, T005H, T005R, T005P, R024A, R024c, R024F, R024L, R024M, R024S, R024W, R024Y, R024G, A025C, A025G, A025L, A025V, S026A, S026C, S026D, S026I, S026M, S026N, S026V, S026W, S026L, S026G, S026H, S026R, Q027A, Q027D, Q027E, Q027F, Q027I, Q027M, Q027N, Q027P, Q027T, S028A, S028D, S028N, S028Q, S028L, S028K, S028H, I029A, I029E, I029F, I029S, I029T, I029R, G030A, G030E, G030F, G030I, G030M, G030P, G030Q, G030S, G030V, G030Y, G030L, G030K, G030H, G030R, T031A, T031F, T031G, T031M, T031S, T031V, T031W, T031L, T031K, T031H, N032G, I033F, I033G, I033M, I033T, I033V, I033H, I048M, I048S, I048L, I048K, K049A, K049E, K049F, K049G, K049N, K049Q, K049S, K049T, K049V, K049Y, K049L, K049H, K049R, A051T, A051L, S052A, S052C, S052D, S052E, S052G, S052I, S052M, S052Q, S052V, S052W, S052R, S052K, E053G, S054M, I055A, I055F, S056G, S056L, S056A, S056C, S056D, S056E, S056F, S056N, S056P, S056Q, S056V, S056W, S056H, S056R, S056K, Y086F, Y086M, Y086H, Y087L, Y087C, Y087D, Y087F, Y087G, Y087I, Y087N, Y087P, Y087S, Y087T, Y087V, Y087W, Y087K, Y087H, Y087R, Q089E, N091L, N091A, N091C, N091I, N091M, N091S, N091T, N091V, N091H, N091R, N092C, N092D, N092L, N092M, N092S, N092T, N092V, N092W, N092Y, N092H, N092K, N092R, N093T, T096L, T096C, T096M, T096V, T097L, T097A, T097D, T097G, T097Q, T097S, T097V, T097K, T097R, F098A, F098M, F098S, F098V, F098Y, G099L, G099D, G099E, G099F, G099I, G099M, G099N, G099S, G099T, G099V, G099K, G099H, Q100C, Q100D, Q100E, Q100F, Q100I, Q100M, Q100N, Q100P, Q100T, Q100V, Q100W, Q100Y, Q100K, Q100H and Q100R with reference to amino acid positions set forth in SEQ ID NO:2 or 4, corresponding amino acid positions are identified by alignment of the VL chain of the antibody with the VL chain set forth in SEQ ID NO:4, and the portion thereof is sufficient to form an antigen binding site and includes the amino acid replacement.

[0153] In examples of the methods provided herein, the unmodified anti-EGFR antibody or variant thereof can include a heavy chain having a sequence of amino acids set forth in SEQ ID NO: 1 or a sequence of amino acids that exhibits at least 75% sequence identity to the sequence of amino acids set forth in SEQ ID NO:1 and a light chain having a sequence of amino acids set forth SEQ ID NO:2 or a sequence of amino acids that exhibits at least 75% sequence identity to the sequence of amino acids set forth in SEQ ID NO:2; or a heavy chain having a having a sequence of amino acids set forth in SEQ ID NO: 8 or a sequence of amino acids that exhibits at least 75% sequence identity to the sequence of amino acids set forth in SEQ ID NO:8 and a light chain having a sequence of amino acids set forth SEQ ID NO:9 or a sequence of amino acids that exhibits at least 75% sequence identity to the sequence of amino acids set forth in SEQ ID NO:9.

[0154] In some examples of the methods provided herein, the unmodified antibody, antigen-binding fragment thereof or variant thereof is humanized. In some examples of the methods provided herein, the unmodified antibody, antigen-binding fragment thereof or variant thereof includes a variable heavy chain set forth in SEQ ID NO:28 and a variable light chain set forth in SEQ ID NO:29. In some examples of the methods provided herein, the unmodified antibody, antigen-binding fragment thereof or variant thereof is an antigen-binding fragment thereof and the antigen-binding fragment is selected from among a Fab, Fab′, F(ab′)₂, single-chain Fv (scFv), Fv, dsFv, diabody, Fd and Fd′ fragments.

[0155] In some examples of the methods provided herein, the unmodified anti-EGFR antibody, antigen-binding fragment thereof or variant thereof is a Fab fragment that includes a heavy chain having a sequence of amino acids set forth in SEQ ID NO:5 or a sequence of amino acids that exhibits at least 75% sequence identity to SEQ ID NO:5 and a light chain having a sequence of amino acids set forth in SEQ ID NO:2 or a sequence of amino acids that exhibits at least 75% sequence identity to a sequence of amino acids set forth in SEQ ID NO:2.

[0156] In any of the Examples of the methods provided herein, the conditionally active anti-EGFR antibody, such as a modified anti-EGFR antibody or an antigen-binding fragment thereof can include a variable heavy (VH) chain set forth in any of SEQ ID NOS: 30-557, 1063, 1064, 1062, 1093, 1098-1107, 1112-1131, 1134-1137 or 1146-1152 or a sequence of amino acids that exhibits at least 75% sequence identity to any of SEQ ID NOS: 3030-557, 1063, 1064, 1062, 1093, 1098-1107, 1112-1131, 1134-1137 or 1146-1152; and/or a variable (VL) chain set forth in any of SEQ ID NOS: 810-1061, 1067-1068, 1138-1145 or 1153-1159 or a sequence of amino acids that exhibits at least 75% sequence identity to any of SEQ ID NOS: 810-1061, 1067-1068, 1138-1145 or 1153-1159.

[0157] In any of the examples of the methods provided herein, the condition responsive to treatment with an anti-EGFR antibody is a tumor, cancer or metastasis. Examples of conditions responsive to treatment with an anti-EGFR antibody are head and neck cancer, non-small cell lung cancer or colorectal cancer. In the methods provided herein, the subject to whom the antibody is administered includes mammals such as, for example, a human.

[0158] In examples of the methods provided herein, the pharmaceutical composition can be administered topically, parenterally, locally, systemically. In some examples, the pharmaceutical composition is administered intranasally, intramuscularly, intradermally, intraperitoneally, intravenously, subcutaneously, orally, or by pulmonary administration.

[0159] The methods provided herein can include combination therapies in which the other anti-tumor therapies, such as surgery, radiation, chemotherapy, viral therapy and other anti-tumor antibodies, is/are administered with, before, during after, and intermittently with antibody therapy. Chemotherapeutic agents that can be administered in combination therapy, include, but are not limited to, for example, irinotecan, simvastatin and 5-fluorouracil (5-FU). The methods provided herein can include administering one or more additional anti-EGFR antibodies and antigen-binding fragments thereof. Non-limiting examples of additional anti-EGFR antibodies include cetuximab, panitumumab, nimotuzumab, and antigen-binding fragments thereof.

[0160] In the methods provided herein, the pharmaceutical composition and the anticancer agent can be formulated as a single composition or as separate compositions. The pharmaceutical composition and the anticancer agent can be administered sequentially, simultaneously or intermittently.

[0161] In the methods provided herein, the antibody can be administered at a dosage of about or 0.1 mg/kg to about or 100 mg/kg, such as, for example, about or 0.5 mg/kg to about or 50 mg/kg, about or 5 mg/kg to about or 50 mg/kg, about or 1 mg/kg to about or 20 mg/kg, about or 1 mg/kg to about or 100 mg/kg, about or 10 mg/kg to about or 80 mg/kg, or about or 50 mg/kg to about or 100 mg/kg or more; or at a dosage of about or 0.01 mg/m² to about or 800 mg/m² or more, such as for example, about or 0.01 mg/m², about or 0.1 mg/m², about or 0.5 mg/m², about or 1 mg/m², about or 5 mg/m², about or 10 mg/m², about or 15 mg/m², about or 20 mg/m², about or 25 mg/m², about or 30 mg/m², about or 35 mg/m², about or 40 mg/m², about or 45 mg/m², about or 50 mg/m², about or 100 mg/m², about or 150 mg/m², about or 200 mg/m², about or 250 mg/m², about or 300 mg/m², about or 400 mg/m², about or 500 mg/m², about or 600 mg/m² about or 700 mg/m² or about or 800 mg/m² or more.

[0162] In some aspects of the methods herein, the subject has a tumor that does not contain a marker that confers resistance to anti-EGFR therapy, such as where the marker is a mutation in KRAS, NRAS or BRAF. For example, the subject has a KRAS mutation-negative epidermal growth factor receptor (EGFR)-expressing colorectal cancer.

[0163] In other examples of the methods herein, the subject contains a tumor with a marker that confers resistance to anti-EGFR therapy, such as a marker that is a mutation in KRAS, NRAS or BRAF and the antibody or fragment thereof is effective against tumors with such markers.

[0164] The compositions provided herein can be for treating any condition responsive to treatment with an anti-EGFR antibody, such as, for example, a tumor, cancer and metastasis. In some examples, the condition responsive to treatment with an anti-EGFR antibody is head and neck cancer, non-small cell lung cancer or other lung cancer or colorectal cancer.

### BRIEF DESCRIPTION OF THE FIGURES

[0165] FIG. 1. Sequence of monoclonal antibody cetuximab (Erbitux®). FIG. 1 depicts the sequence of cetuximab (SEQ ID NO:1 and 2). FIG. 1A depicts the sequence of the heavy chain. FIG. 1B depicts the sequence of the light chain. The variable chains are underlined and the residues selected for modification are in boldface, italic type.

[0166] FIG. 2. Alignments of anti-EGFR antibodies. FIG. 2 depicts exemplary alignments of the cetuximab heavy and light chains with other anti-EGFR antibodies. A “*” means that the aligned residues are identical, a “:” means that aligned residues are not identical, but are similar and contain conservative amino acids residues at the aligned position, and a “.” means that the aligned residues are similar and contain semi-conservative amino acid residues at the aligned position. Exemplary, non-limiting, corresponding positions for amino acid replacements are indicated by highlighting. For example, FIG. 2A depicts the alignment of the cetuximab heavy chain variable region (V_{H}; SEQ ID NO:3 and light chain variable region (V_{L}; SEQ ID NO:4) with Hu225, V_{H} set forth in SEQ ID NO:28 and V_{L} set forth in SEQ ID NO:29. FIG. 2B depicts the alignment of the cetuximab heavy chain variable region (V_{H}; SEQ ID NO:3 and light chain variable region (V_{L}; SEQ ID NO:4) with a reference anti-EGFR antibody, V_{H} set forth in SEQ ID NO:3 and V_{L} set forth in SEQ ID NO:10.

[0167] FIG. 3. Inhibition of EGF antigen induced phosphorylation of EGFR. FIG. 3 depicts inhibition of EGFR phosphorylation by Cetuximab and the HC-Y104D modified anti-EGFR antibody. FIG. 3A depicts inhibition of EGF-induced phosphorylation of A431 cells. FIG. 3B depicts the dose-dependent inhibitory effects with the concentration of phosphorylated EGFR plotted against the concentration of antibody (Cetuximab or HC-Y104D anti-EGFR antibody). FIG. 3C depicts inhibition of EGF-induced phosphorylation of neonatal Keratinocytes. FIG. 4. Cell growth inhibition of Human adult keratinocytes or Human neonatal keratinocytes in the presence of Cetuximab or modified HC-Y104D anti-EGFR antibody. FIG. 4 depicts the growth of Human adult keratinocytes or Human neonatal keratinocytes with Cetuximab or HC-Y104D modified anti-EGFR antibody. FIG. 4A depicts growth of Human adult keratinocytes with Cetuximab or HC-Y104D modified anti-EGFR antibody. FIG. 4B depicts growth of Human neonatal Keratinocytes with Cetuximab or HC-Y104D modified anti-EGFR antibody.

[0168] FIG. 5. In vivo animal model of administered Cetuximab or modified HC-Y104D anti-EGFR antibody. FIG. 5 depicts inhibition of tumor growth in a mouse xenograft tumor model by Cetuximab and the HC-Y104D modified anti-EGFR antibody.

[0169] FIG. 6. Difference in tumor and skin binding between Cetuximab and modified HC-Y104D anti-EGFR antibody. FIG. 6 depicts the ratio of DL755-labeled Cetuximab and modified HC-Y104D antibody binding of xenograft tumors to human skin grafts over a 7-day time course, following administration of a single i.v. dose of antibody.

### DETAILED DESCRIPTION

### Outline

[0170] A. DEFINITIONS
[0171] B. EGFR AND ANTI-EGFR ANTIBODIES
   [0172] 1. EGFR
   [0173] 2. Anti-EGFR Antibodies and Side Effects
   [0174] 3. Cetuximab
      [0175] a. Structure
      [0176] b. Function
[0177] C. MODIFIED ANTI-EGFR ANTIBODIES AND CONDITIONALLY ACTIVE ANTI-EGFR ANTIBODIES
   [0178] 1. Modified Anti-EGFR Antibodies
      [0179] a. Heavy Chain Modifications
      [0180] b. Light Chain Modifications
      [0181] c. Exemplary modified Anti-EGFR Antibodies and Fragments
[0182] Thereof
   [0183] 2. Humanized Anti-EGFR Antibodies
   [0184] 3. Additional Modifications
   [0185] 4. Conjugates
      [0186] a. Targeted Agents
         [0187] i. Maytansinoid Drug Moieties
         [0188] ii. Auristatins and Dolastatins Drug Moieties
         [0189] iii. Cell Toxin Moieties
         [0190] iv. Nucleic acids for targeted delivery
      [0191] b. Linkers
         [0192] i. Peptide Linkers
         [0193] ii. Chemical Linkers
[0194] D. METHODS FOR IDENTIFYING AND ASSESSING ANTI-EGFR ANTIBODY PROPERTIES AND ACTIVITIES
   [0195] 1. Binding Assays
      [0196] a. Solid Support Binding Assays
         [0197] i. Surface plasmon resonance
         [0198] ii. Bio-layer interferometry
         [0199] iii. Immunoassays
            [0200] a) ELISA
            [0201] b) Immunoprecipitation
            [0202] c) Western blot
            [0203] d) Immunohistochemistry
            [0204] e) Radioimmunoassay
      [0205] b. Solution Binding Assays
         [0206] i. Isothermal titration calorimetry (ITC)
         [0207] ii. Spectroscopic assays
   [0208] 2. Cell Based Assays
   [0209] 3. Animal Models
      [0210] a. Assessing Side Effects
   [0211] 4. Pharmacokinetics and Pharmacodynamics assays
[0212] E. METHODS OF IDENTIFYING GENERATING AND PRODUCING ANTI-EGFR ANTIBODIES
   [0213] 1. Identifying Conditionally Therapeutic Proteins
   [0214] 2. Generating and Producing Anti-EGFR Antibodies
      [0215] a. Vectors
      [0216] b. Cells and Expression Systems
         [0217] i. Prokaryotic Expression
         [0218] ii. Yeast
         [0219] iii. Insects
         [0220] iv. Mammalian Cells
         [0221] v. Plants
   [0222] 3. Purification
[0223] F. PHARMACEUTICAL COMPOSITIONS, FORMULATIONS, KITS, ARTICLES OF MANUFACTURE AND COMBINATIONS
   [0224] 1. Pharmaceutical Compositions and Formulations
   [0225] 2. Articles of Manufacture/Kits
   [0226] 3. Combinations
[0227] G. THERAPEUTIC USES
   [0228] 1. Exemplary Diseases and Conditions
      [0229] a. Cancer
      [0230] b. Non-Cancer Hyperproliferative Diseases
      [0231] c. Autoimmune Diseases or Disorders
      [0232] d. Inflammatory Disorders
      [0233] e. Infectious Diseases
      [0234] f. Other Diseases and Conditions
   [0235] 2. Subjects for therapy
      [0236] a. Selection of Subjects Overexpressing EGFR
      [0237] b. Selection of Subjects Exhibiting EGFR-associated Polymorphism
      [0238] c. Identifying Subjects Exhibiting Anti-EGFR-Associated Side Effects
         [0239] i. Skin toxicities
         [0240] ii. Hypomagnesemia
      [0241] d. Other Methods of Selecting or Identifying Subjects For Treatment
   [0242] 3. Dosages
   [0243] 4. Routes of Administration
   [0244] 5. Combination Therapies
[0245] H. EXAMPLES

### A. DEFINITIONS

[0246] Unless defined otherwise, all technical and scientific terms used herein have the same meaning as is commonly understood by one of skill in the art to which the invention(s) belong. All patents, patent applications, published applications and publications, Genbank sequences, databases, websites and other published materials referred to throughout the entire disclosure herein, unless noted otherwise, are incorporated by reference in their entirety. In the event that there are a plurality of definitions for terms herein, those in this section prevail. Where reference is made to a URL or other such identifier or address, it is understood that such identifiers can change and particular information on the internet can come and go, but equivalent information can be found by searching the internet. Reference thereto evidences the availability and public dissemination of such information.

[0247] As used herein, a conditionally active protein is more active in one environment, particularly one in vivo environment, compared to a second environment. For example, a conditionally active protein can be more active in a tumor environment than in a non-tumor environment, such as a non-tumor environment in the skin, GI tract or other non-tumor environment.

[0248] As used herein, a therapeutic agent that has “conditional activity in a tumor microenvironment,” or is “conditionally active in a tumor microenvironment,” or variations thereof, is a therapeutic agent, such as an anti-EGFR antibody (e.g. a modified anti-EGFR antibody) provided herein, that is more active as a therapeutic in a tumor microenvironment than in a non-tumor microenvironment (e.g. a healthy or non-diseased tissue or cell, such as the basal layer of the skin). Conditional activity in a tumor microenvironment can be assessed in vivo or in vitro. For example, conditional activity in a tumor microenvironment can be assessed in vitro in binding assays for binding to EGFR under conditions that that exist in a tumor microenvironment, such as under low pH (e.g. pH 6.0 to 6.5) or elevated lactate concentrations (e.g. 10 mM to 20 mM), compared to conditions that exist in a non-tumor environment, such as neutral pH (e.g. 7.0 to 7.4) or low lactate concentrations (e.g. 1 mM to 5 mM). Conditional activity exists if the ratio of activity (e.g. binding activity) is greater under conditions of the tumor environment (e.g. pH 6.0 to 6.5 and/or 10 mM to 20 mM lactate) than under conditions of a non-tumor environment (e.g. pH 7.0 to 7.4 and 1 mM to 5 mM lactate). For example, conditional activity in a tumor environment exists if the ratio of activity is at least 1.1, 1.2, 1.3, 1.4, 1.5, 1.6, 1.7, 1.8, 1.9, 2.0, 2.5, 3.0, 3.5, 4.0, 4.5, 5.0 or more. In some cases, the conditional activity in a tumor environment exists if the ratio of activity is greater than 5.0, such as at least 6.0, 7.0, 8.0, 9.0, 10.0, 11.0, 12.0, 13.0, 14.0, 15.0, 16.0, 17.0, 18.0, 19.0, 20.0, 25.0, 30.0, 35.0, 40.0, 45.0, 50.0 or more.

[0249] Included among an anti-EGFR antibody provided herein that is conditionally active in a tumor microenvironment are antibodies that contain one or more modification(s) (e.g. amino acid replacement(s), insertions or deletions) compared to the same antibody without the modifications, and by virtue of the modification(s) is more active in a tumor microenvironment than in a non-tumor microenvironment. For example, the antibodies that are modified to render them conditionally active generally contain one or more modifications in cetuximab or an antigen-binding fragment thereof or variants thereof. The variants include those with modifications other than the modifications provided herein, such as by humanization to decrease immunogenicity. Typically, the modified anti-EGFR antibodies provided herein are more active (i.e. exhibit greater or increased activity) in a tumor microenvironment than in a non-tumor microenvironment compared to the corresponding form of the unmodified cetuximab, antigen-binding fragment thereof or variant thereof. For example, conditional activity can result from decreased activity (e.g. binding activity to an EGFR) of the modified anti-EGFR antibody in a non-tumor environment compared to the unmodified antibody, while retaining or exhibiting similar activity or increased activity compared to the unmodified antibody in the tumor environment.

[0250] As used herein, “conditions that simulate” a diseased or non-diseased microenvironment, refer to in vitro or in vivo assay conditions that correspond to a condition or conditions that exist in the environment in vivo. For example, if a microenvironment is characterized by low pH, then conditions that simulate the microenvironment include buffer or assay conditions having a low pH.

[0251] As used herein, conditions that exist in a tumor microenvironment include conditions that exist therein compared to a non-tumor microenvironment (e.g. a healthy or non-diseased cell or tissue). Conditions that exist in a tumor microenvironment include increased vascularization, hypoxia, low pH, increased lactate concentration, increased pyruvate concentration, increased interstitial fluid pressure and altered metabolites or metabolism indicative of a tumor. For example, a condition that exists in a tumor microenvironment is low pH less than 7.4, typically between or about between 5.6 to 6.8, such as less than or about or pH 5.6, 5.7, 5.8, 5.9, 6.0, 6.1, 6.2, 6.3, 6.4, 6.5, 6.6, 6.7, or 6.8. In another example, a condition that exists in a tumor microenvironment is high lactate concentration at or about between 5 mM to 20 mM lactic acid, for example 10 mM to 20 mM lactic acid such as 15 mM to 18 mM, and in particular at least or at least about or 16 mM, 16.5 mM or 17 mM lactic acid.

[0252] As used herein, conditions that exist in a non-tumor microenvironment include a condition or conditions that are not present in a tumor microenvironment. For purposes herein, the conditions or condition is the corresponding property or characteristic that is present in a tumor microenvironment and non-tumor environment, such as pH, lactate concentration or pyruvate concentration, but that differs between the two microenvironments. A condition that exists in a non-tumor microenvironment (e.g. basal layer of the skin) is pH from about 7.0 to about 7.8, such as at least or about or pH 7.1, 7.2, 7.3, 7.4, 7.5, 7.6, 7.7 or 7.8 (see, e.g., U.S. Pat. No. 7,781,405), in some examples pH 7.4. For example, the pH is a neutral pH of between or about between 7.0 to 7.4. A condition that exists in a non-tumor microenvironment (e.g. basal layer of the skin) is lactate concentration that is 0.5 to 5 mM lactate, such as, for example 0.2 mM to 4 mM lactic acid, such as 0.5, 1, 2, 3, 4, or 5 mM lactic acid.

[0253] As used herein, “low pH” refers to a pH ranging from about 5.6 to about 6.8, such as less than or about or pH 5.6, 5.7, 5.8, 5.9, 6.0, 6.1, 6.2, 6.3, 6.4, 6.5, 6.6, 6.7, or 6.8.

[0254] As used herein, recitation that proteins are “compared under the same conditions” means that different proteins are treated identically or substantially identically such that any one or more conditions that can influence the activity or properties of a protein or agent are not varied or not substantially varied between the test agents. For example, when the activity of a modified anti-EGFR antibody is compared to an unmodified anti-EGFR antibody any one or more conditions such as amount or concentration of the polypeptide; presence, including amount, of excipients, carriers or other components in a formulation other than the active agent (e.g. modified anti-EGFR antibody); temperature; pH, time of storage; storage vessel; properties of storage (e.g. agitation) and/or other conditions associated with exposure or use are identical or substantially identical between and among the compared polypeptides.

[0255] As used herein, an “adverse effect,” or “side effect” or “adverse event,” or “adverse side effect” refers to a harmful, deleterious and/or undesired effect associated with administering a therapeutic agent. For example, side effects associated with administration of an anti-EGFR antibody, such as cetuximab are known to one of skill in the art and described herein. Such side effects include, for example, dermatological or dermal toxicity such as rash. Side effects or adverse effects are graded on toxicity and various toxicity scales exist providing definitions for each grade. Exemplary of such scales are toxicity scales of the National Cancer Institute Common Toxicity Criteria version 2.0, the World Health Organization or Common Terminology Criteria for Adverse Events (CTCAE) scale. Generally, the scale is as follows: Grade 1=mild side effects; Grade 2=moderate side effects; Grade 3=Severe side effects; Grade 4=Life Threatening or Disabling side-effects; Grade 5=Fatal. Assigning grades of severity is within the experience of a physician or other health care professional.

[0256] As used herein, epidermal growth factor receptor (EGFR; Uniprot Accession No. P00533 and set forth in SEQ ID NO:6) refers to a tyrosine kinase growth factor receptor that is a member of the ErbB family of receptor tyrosine kinases and that is bound and activated by ligands such as epidermal growth factor (EGF), as well as other endogenous EGF-like ligands including TGF-α, amphiregulin, heparin-binding EGF (HB-EGF) and betacellulin. Upon activation, EGFR is involved in signaling cascades important for cell growth, proliferation, survival and motility. In addition to their presence on a tumor cells, epidermal growth factor receptors are ubiquitous, distributed randomly on the surface of normal cells, excluding hematopoietic cells and cells of epidermal origin. For example, EGFR is expressed on skin keratinocytes.

[0257] As used herein, anti-EGFR antibody refers to any antibody that specifically binds to EGFR and blocks the binding of ligands to EGFR, thereby resulting in competitive inhibition of EGFR and inhibition of EGFR activation. Hence, anti-EGFR antibodies are EGFR inhibitors. Reference to anti-EGFR antibodies herein include a full-length antibody and antigen-binding fragments thereof that specifically bind to EGFR.

[0258] As used herein, cetuximab (225, also known and marketed as Erbitux) refers to an anti-EGFR antibody that is a chimeric (mouse/human) monoclonal antibody that is an EGFR inhibitor. Cetuximab has the sequence of amino acids set forth in SEQ ID NO:1 (heavy chain) and SEQ ID NO:2 (light chain).

[0259] As used herein, an antigen-binding fragment of cetuximab refers to and antibody derived from cetuximab but that is less than the full length of cetuximab but contains at least a portion of the variable region of the antibody sufficient to form an antigen binding site (e.g. one or more CDRs) and thus retains the binding specificity and/or activity of cetuximab. Exemplary of antigen-binding fragments of cetuximab include antibodies that contain the sequence of amino acids set forth in SEQ ID NO:3 (variable heavy chain) and the sequence of amino acids set forth in SEQ ID NO:4 (variable light chain), or a portion of SEQ ID NO:3 and SEQ ID NO:4 sufficient to bind to antigen. For example, exemplary of an antigen-binding fragment of cetuximab is a Fab antibody that contains the sequence of amino acids set forth in SEQ ID NO:5 (VH-CH1) and SEQ ID NO:2 (light chain VH-CL).

[0260] As used herein, a variant of cetuximab refers to an antibody derived from cetuximab or an antigen-binding fragment thereof that exhibits one or more modifications in cetuximab other than the modifications provided herein, and that specifically binds EGFR. For example, variants of cetuximab include humanization variants to reduce toxicity. Exemplary variants of cetuximab include those that have a sequence of amino acids for a variable heavy chain that exhibit at least 75%, 80%, 85%, 90%, 91%, 92%, 93%, 94%, 95%, 96%, 97%, 98%, 99% or more sequence identity to the sequence of amino acids set forth in SEQ ID NO:3 and/or a sequence of amino acids for a variable light chain that exhibits at least 75%, 80%, 85%, 90%, 91%, 92%, 93%, 94%, 95%, 96%, 97%, 98%, 99% or more sequence identity to the sequence of amino acids set forth in SEQ ID NO:4, and that do not contain any the modification(s) provided herein (prior to modification thereof) and that specifically bind to EGFR. For example, exemplary of cetuximab variants provided herein are antibodies having a variable heavy chain set forth in SEQ ID NO:1 and a variable light chain set forth in SEQ ID NO:10, or antibodies having a variable heavy chain set forth in SEQ ID NO:28 and a variable light chain set forth in SEQ ID NO:29 or antibodies having a heavy chain set forth in SEQ ID NO:8 and a light chain set forth in SEQ ID NO:9, and corresponding antibody forms thereof. It is understood that variants of cetuximab that do not initially contain modifications provided herein can be used as an unmodified antibody and can be further modified to contain modifications provided herein.

[0261] As used herein, “both” with reference to modifications in a variable heavy chain, variable light chain or both means that an antibody contains one or more modifications in the variable heavy chain and one or more modifications in the variable light chain of the antibody.

[0262] As used herein, an “unmodified antibody” refers to a starting polypeptide heavy and light chain or fragment thereof that is selected for modification as provided herein. The starting target polypeptide can be a wild-type or reference form of an antibody, which is a predominant reference polypeptide to which activity is assessed. For example, cetuximab is a predominant or reference polypeptide for modification herein. The unmodified or starting target antibody can be altered or mutated, such that it differs from a predominant or reference form of the antibody, but is nonetheless referred to herein as a starting unmodified target protein relative to the subsequently modified polypeptides produced herein (e.g. antigen-binding fragments or variants of cetuximab). Thus, existing proteins known in the art that have been modified to have a desired increase or decrease in a particular activity or property compared to an unmodified reference protein can be selected and used as the starting unmodified target protein. For example, a protein that has been modified from a predominant or reference form by one or more single amino acid changes and possesses either an increase or decrease in a desired property, such as reduced immunogenicity can be a target protein, referred to herein as unmodified, for further modification of either the same or a different property.

[0263] As used herein, “modified anti-EGFR antibody” or “variant anti-EGFR antibody” refers to an anti-EGFR antibody that contains at least one amino acid addition, deletion or replacement as described herein in its sequence of amino acids compared to a reference or unmodified anti-EGFR antibody. Exemplary reference or unmodified anti-EGFR antibody are a full length anti-EGFR antibody polypeptide set forth in SEQ ID NOS: 1 (Heavy Chain) and 2 (Light Chain) or SEQ ID NO: 8 (Heavy Chain) and SEQ ID NO:9 (Light Chain); or antigen-binding fragments thereof such as an anti-EGFR antibody polypeptide set forth in SEQ ID NO:3 (variable Heavy Chain) and SEQ ID NO:4 (variable light chain), SEQ ID NO:5 (VH-CH1) and SEQ ID NO:2 (VL), or SEQ ID NO:3 (variable heavy chain) and SEQ ID NO:10 (variable light chain) or antibody variants thereof that exhibits heavy or light chains or portions thereof that exhibits at least 68%, 69%, 70%, 75%, 80%, 85%, 86%, 87%, 88%, 89%, 90%, 91%, 92%, 93%, 94%, 95%, 96%, 97%, 98%, or 99% sequence identity thereto to any of the recited SEQ ID NOS, whereby the resulting antibody specifically binds EGFR. A modified anti-EGFR antibody can have up to 150 amino acid replacements, so long as the resulting modified anti-EGFR antibody exhibits binding to EGFR. Typically, a modified anti-EGFR antibody contains 1, 2, 3, 4, 5, 6, 7, 8, 9, 10, 11, 12, 13, 14, 15, 16, 17, 18, 19, 20, 21, 22, 23, 24, 25, 26, 27, 28, 29, 30, 31, 32, 33, 34, 35, 36, 37, 38, 39, 40, 41, 42, 43, 44, 45, 46, 47, 48, 49, or 50 amino acid replacements. It is understood that a modified anti-EGFR antibody also can include any one or more other modifications, in addition to at least one amino acid addition, deletion or replacement as described herein.

[0264] As used herein, a “modification” is in reference to modification of a sequence of amino acids of a polypeptide or a sequence of nucleotides in a nucleic acid molecule and includes deletions, insertions, and replacements of amino acids and nucleotides, respectively. Methods of modifying a polypeptide are routine to those of skill in the art, such as by using recombinant DNA methodologies.

[0265] As used herein, “deletion,” when referring to a nucleic acid or polypeptide sequence, refers to the deletion of one or more nucleotides or amino acids compared to a sequence, such as a target polynucleotide or polypeptide or a native or wild-type sequence.

[0266] As used herein, “insertion” when referring to a nucleic acid or amino acid sequence, describes the inclusion of one or more additional nucleotides or amino acids, within a target, native, wild-type or other related sequence. Thus, a nucleic acid molecule that contains one or more insertions compared to a wild-type sequence, contains one or more additional nucleotides within the linear length of the sequence. As used herein, “additions,” to nucleic acid and amino acid sequences describe addition of nucleotides or amino acids onto either termini compared to another sequence.

[0267] As used herein, “substitution” or “replacement” refers to the replacing of one or more nucleotides or amino acids in a native, target, wild-type or other nucleic acid or polypeptide sequence with an alternative nucleotide or amino acid, without changing the length (as described in numbers of residues) of the molecule. Thus, one or more substitutions in a molecule does not change the number of amino acid residues or nucleotides of the molecule. Amino acid replacements compared to a particular polypeptide can be expressed in terms of the number of the amino acid residue along the length of the polypeptide sequence. For example, a modified polypeptide having a modification in the amino acid at the 19^{th} position of the amino acid sequence that is a substitution of Isoleucine (Ile; I) for cysteine (Cys; C) can be expressed as 119C, Ile19C, or simply C19, to indicate that the amino acid at the modified 19^{th} position is a cysteine. In this example, the molecule having the substitution has a modification at Ile 19 of the unmodified polypeptide. For purposes herein, since modifications are in a heavy chain (HC) or light chain (LC) of an antibody, modifications also can be denoted by reference to HC— or LC— to indicate the chain of the polypeptide that is altered.

[0268] As used herein, “at a position corresponding to” or recitation that nucleotides or amino acid positions “correspond to” nucleotides or amino acid positions in a disclosed sequence, such as set forth in the Sequence listing, refers to nucleotides or amino acid positions identified upon alignment with the disclosed sequence to maximize identity using a standard alignment algorithm, such as the GAP algorithm. For purposes herein, residues for modification provided herein are with reference to amino acid positions set forth in the variable heavy chain set forth in SEQ ID NO:3 and the variable light chain set forth in SEQ ID NO:4. Hence, corresponding residues can be determined by alignment of a reference heavy chain sequence, or portion thereof, with the sequence set forth in SEQ ID NO:3 and/or by alignment of a reference light chain sequence, or portion thereof, with the sequence set forth in SEQ ID NO:4. By aligning the sequences, one skilled in the art can identify corresponding residues, for example, using conserved and identical amino acid residues as guides. In general, to identify corresponding positions, the sequences of amino acids are aligned so that the highest order match is obtained (see, e.g.: Computational Molecular Biology, Lesk, A. M., ed., Oxford University Press, New York, 1988; Biocomputing: Informatics and Genome Projects, Smith, D. W., ed., Academic Press, New York, 1993; Computer Analysis of Sequence Data, Part I, Griffin, A. M., and Griffin, H. G., eds., Humana Press, New Jersey, 1994; Sequence Analysis in Molecular Biology, von Heinje, G., Academic Press, 1987; and Sequence Analysis Primer, Gribskov, M. and Devereux, J., eds., M Stockton Press, New York, 1991; Carillo et al. (1988) SIAM J Applied Math 48:1073). Exemplary alignments are provided in FIG. 2 and exemplary amino acid replacements based on corresponding aligned residues are set forth in Table 5 and Table 7.

[0269] As used herein, alignment of a sequence refers to the use of homology to align two or more sequences of nucleotides or amino acids. Typically, two or more sequences that are related by 50% or more identity are aligned. An aligned set of sequences refers to 2 or more sequences that are aligned at corresponding positions and can include aligning sequences derived from RNAs, such as ESTs and other cDNAs, aligned with genomic DNA sequence. Related or variant polypeptides or nucleic acid molecules can be aligned by any method known to those of skill in the art. Such methods typically maximize matches, and include methods, such as using manual alignments and by using the numerous alignment programs available (e.g., BLASTP) and others known to those of skill in the art. By aligning the sequences of polypeptides or nucleic acids, one skilled in the art can identify analogous portions or positions, using conserved and identical amino acid residues as guides. Further, one skilled in the art also can employ conserved amino acid or nucleotide residues as guides to find corresponding amino acid or nucleotide residues between and among human and non-human sequences. Corresponding positions also can be based on structural alignments, for example by using computer simulated alignments of protein structure. In other instances, corresponding regions can be identified. One skilled in the art also can employ conserved amino acid residues as guides to find corresponding amino acid residues between and among human and non-human sequences.

[0270] As used herein, a “property” of a polypeptide, such as an antibody, refers to any property exhibited by a polypeptide, including, but not limited to, binding specificity, structural configuration or conformation, protein stability, resistance to proteolysis, conformational stability, thermal tolerance, and tolerance to pH conditions. Changes in properties can alter an “activity” of the polypeptide. For example, a change in the binding specificity of the antibody polypeptide can alter the ability to bind an antigen, and/or various binding activities, such as affinity or avidity, or in vivo activities of the polypeptide.

[0271] As used herein, an “activity” or a “functional activity” of a polypeptide, such as an antibody, refers to any activity exhibited by the polypeptide. Such activities can be empirically determined. Exemplary activities include, but are not limited to, ability to interact with a biomolecule, for example, through antigen-binding, DNA binding, ligand binding, or dimerization, enzymatic activity, for example, kinase activity or proteolytic activity. For an antibody (including antibody fragments), activities include, but are not limited to, the ability to specifically bind a particular antigen, affinity of antigen-binding (e.g. high or low affinity), avidity of antigen-binding (e.g. high or low avidity), on-rate, off-rate, effector functions, such as the ability to promote antigen neutralization or clearance, virus neutralization, and in vivo activities, such as the ability to prevent infection or invasion of a pathogen, or to promote clearance, or to penetrate a particular tissue or fluid or cell in the body. Activity can be assessed in vitro or in vivo using recognized assays, such as ELISA, flow cytometry, surface plasmon resonance or equivalent assays to measure on- or off-rate, immunohistochemistry and immunofluorescence histology and microscopy, cell-based assays, flow cytometry and binding assays (e.g., panning assays). For example, for an antibody polypeptide, activities can be assessed by measuring binding affinities, avidities, and/or binding coefficients (e.g., for on-/off-rates), and other activities in vitro or by measuring various effects in vivo, such as immune effects, e.g. antigen clearance, penetration or localization of the antibody into tissues, protection from disease, e.g. infection, serum or other fluid antibody titers, or other assays that are well known in the art. The results of such assays that indicate that a polypeptide exhibits an activity can be correlated to activity of the polypeptide in vivo, in which in vivo activity can be referred to as therapeutic activity, or biological activity. Activity of a modified polypeptide can be any level of percentage of activity of the unmodified polypeptide, including but not limited to, 1% of the activity, 2%, 3%, 4%, 5%, 10%, 20%, 30%, 40%, 50%, 60%, 70%, 80%, 90%, 91%, 92%, 93%, 94%, 95%, 96%, 97%, 98%, 99%, 100%, 200%, 300%, 400%, 500%, or more of activity compared to the unmodified polypeptide. Assays to determine functionality or activity of modified (e.g. variant) antibodies are well known in the art.

[0272] As used herein, “exhibits at least one activity” or “retains at least one activity” refers to the activity exhibited by a modified polypeptide, such as a variant antibody or other therapeutic polypeptide (e.g. a-modified anti-EGFR antibody or antigen-binding fragment thereof), compared to the target or unmodified polypeptide, that does not contain the modification. A modified, or variant, polypeptide that retains an activity of a target polypeptide can exhibit improved activity, decreased activity, or maintain the activity of the unmodified polypeptide. In some instances, a modified, or variant, polypeptide can retain an activity that is increased compared to a target or unmodified polypeptide. In some cases, a modified, or variant, polypeptide can retain an activity that is decreased compared to an unmodified or target polypeptide. Activity of a modified, or variant, polypeptide can be any level of percentage of activity of the unmodified or target polypeptide, including but not limited to, 1% of the activity, 2%, 3%, 4%, 5%, 10%, 20%, 30%, 40%, 50%, 60%, 70%, 80%, 90%, 91%, 92%, 93%, 94%, 95%, 96%, 97%, 98%, 99%, 100%, 200%, 300%, 400%, 500%, or more activity compared to the unmodified or target polypeptide. In other embodiments, the change in activity is at least about 2 times, 3 times, 4 times, 5 times, 6 times, 7 times, 8 times, 9 times, 10 times, 20 times, 30 times, 40 times, 50 times, 60 times, 70 times, 80 times, 90 times, 100 times, 200 times, 300 times, 400 times, 500 times, 600 times, 700 times, 800 times, 900 times, 1000 times, or more times greater than unmodified or target polypeptide. Assays for retention of an activity depend on the activity to be retained. Such assays can be performed in vitro or in vivo. Activity can be measured, for example, using assays known in the art and described in the Examples below for activities such as but not limited to ELISA and panning assays. Activities of a modified, or variant, polypeptide compared to an unmodified or target polypeptide also can be assessed in terms of an in vivo therapeutic or biological activity or result following administration of the polypeptide.

[0273] As used herein, “increased activity” with reference to a modified anti-EGFR antibody means that, when tested under the same conditions, the modified anti-EGFR antibody exhibits greater activity compared to an unmodified anti-EGFR antibody not containing the amino acid replacement(s). For example, a modified anti-EGFR antibody exhibits at least or about at least 110%, 120%, 130%, 140%, 150%, 160%, 170%, 180%, 190%, 200%, 250%, 300%, 400%, 500%, 600%, 700%, 800%, 900%, 1000% or more of the activity of the unmodified or reference anti-EGFR antibody.

[0274] As used herein, “bind,” “bound” or grammatical variations thereof refers to the participation of a molecule in any attractive interaction with another molecule, resulting in a stable association in which the two molecules are in close proximity to one another. Binding includes, but is not limited to, non-covalent bonds, covalent bonds (such as reversible and irreversible covalent bonds), and includes interactions between molecules such as, but not limited to, proteins, nucleic acids, carbohydrates, lipids, and small molecules, such as chemical compounds including drugs. Exemplary of bonds are antibody-antigen interactions and receptor-ligand interactions. When an antibody “binds” a particular antigen, bind refers to the specific recognition of the antigen by the antibody, through cognate antibody-antigen interaction, at antibody combining sites. Binding also can include association of multiple chains of a polypeptide, such as antibody chains which interact through disulfide bonds.

[0275] As used herein, binding activity refer to characteristics of a molecule, e.g. a polypeptide, relating to whether or not, and how, it binds one or more binding partners. Binding activities include the ability to bind the binding partner(s), the affinity with which it binds to the binding partner (e.g. high affinity), the avidity with which it binds to the binding partner, the strength of the bond with the binding partner and/or specificity for binding with the binding partner.

[0276] As used herein, “affinity” or “binding affinity” describes the strength of the interaction between two or more molecules, such as binding partners, typically the strength of the noncovalent interactions between two binding partners. The affinity of an antibody or antigen-binding fragment thereof for an antigen epitope is the measure of the strength of the total noncovalent interactions between a single antibody combining site and the epitope. Low-affinity antibody-antigen interaction is weak, and the molecules tend to dissociate rapidly, while high affinity antibody-antigen-binding is strong and the molecules remain bound for a longer amount of time. Methods for calculating affinity are well known, such as methods for determining association/dissociation constants. For example, a high antibody affinity means that the antibody specifically binds to a target protein with an equilibrium association constant (K_{A}) of greater than or equal to about 10⁶ M⁻¹, greater than or equal to about 10⁷ M⁻¹, greater than or equal to about 10⁸ M⁻¹, or greater than or equal to about 10⁹ M⁻¹, 10¹⁰ M⁻¹, 10¹¹ M⁻¹ or 10¹² M⁻¹. Antibodies also can be characterized by an equilibrium dissociation constant (K_{D}) 10⁻⁴ M, 10⁻⁶ M to 10⁻⁷ M, or 10⁻⁸ M, 10⁻¹⁰M, 10⁻¹¹ M or 10⁻¹² M or lower. Affinity can be estimated empirically or affinities can be determined comparatively, e.g. by comparing the affinity of one antibody and another antibody for a particular antigen. For example, such affinities can be readily determined using conventional techniques, such as by equilibrium dialysis; by using the BIAcore 2000 instrument, using general procedures outlined by the manufacturer; by radioimmunoassay using radiolabeled target antigen; or by another method known to the skilled artisan. The affinity data can be analyzed, for example, by the method of Scatchard et al., Ann N.Y. Acad. Sci., 51:660 (1949).

[0277] As used herein, antibody avidity refers to the strength of multiple interactions between a multivalent antibody and its cognate antigen, such as with antibodies containing multiple binding sites associated with an antigen with repeating epitopes or an epitope array. A high avidity antibody has a higher strength of such interactions compared with a low avidity antibody.

[0278] As used herein, “affinity constant” refers to an association constant (Ka) used to measure the affinity of an antibody for an antigen. The higher the affinity constant the greater the affinity of the antibody for the antigen. Affinity constants are expressed in units of reciprocal molarity (i.e. M⁻¹) and can be calculated from the rate constant for the association-dissociation reaction as measured by standard kinetic methodology for antibody reactions (e.g., immunoassays, surface plasmon resonance, or other kinetic interaction assays known in the art). The binding affinity of an antibody also can be expressed as a dissociation constant, or Kd. The dissociation constant is the reciprocal of the association constant, Kd=1/Ka. Hence, an affinity constant also can be represented by the Kd.

[0279] As used herein, the term “the same,” when used in reference to antibody binding affinity, means that the association constant (Ka) or dissociation constant (Kd) is within about 1 to 100 fold or 1 to 10 fold of the reference antibody (1-100 fold greater affinity or 1-100 fold less affinity, or any numerical value or range or value within such ranges, than the reference antibody).

[0280] As used herein, “substantially the same” when used in reference to association constant (Ka) or dissociation constant (Kd), means that the association constant is within about 5 to 5000 fold greater or less than the association constant, Ka, of the reference antibody (5-5000 fold greater or 5-5000 fold less than the reference antibody).

[0281] As used herein, “specifically bind” or “immunospecifically bind” with respect to an antibody or antigen-binding fragment thereof are used interchangeably herein and refer to the ability of the antibody or antigen-binding fragment to form one or more noncovalent bonds with a cognate antigen, by noncovalent interactions between the antibody combining site(s) of the antibody and the antigen. Typically, an antibody that immunospecifically binds (or that specifically binds) to EGFR is one that binds to EGFR with an affinity constant Ka of about or 1×10⁷ M⁻¹ or 1×10⁸ M⁻¹ or greater (or a dissociation constant (K_{d}) of 1×10⁻⁷ M or 1×10⁻⁸ M or less). Affinity constants can be determined by standard kinetic methodology for antibody reactions, for example, immunoassays, surface plasmon resonance (SPR) (Rich and Myszka (2000) Curr. Opin. Biotechnol 11:54; Englebienne (1998) Analyst. 123:1599), isothermal titration calorimetry (ITC) or other kinetic interaction assays known in the art (see, e.g., Paul, ed., Fundamental Immunology, 2nd ed., Raven Press, New York, pages 332-336 (1989); see also U.S. Pat. No. 7,229,619 for a description of exemplary SPR and ITC methods for calculating the binding affinity of antibodies). Instrumentation and methods for real time detection and monitoring of binding rates are known and are commercially available (e.g., BiaCore 2000, Biacore AB, Upsala, Sweden and GE Healthcare Life Sciences; Malmqvist (2000) Biochem. Soc. Trans. 27:335). Antibodies or antigen-binding fragments that immunospecifically bind to a particular antigen (e.g. EGFR) can be identified, for example, by immunoassays, such as radioimmunoassays (RIA), enzyme-linked immunosorbent assays (ELISAs), surface plasmon resonance, or other techniques known to those of skill in the art.

[0282] As used herein, the term “surface plasmon resonance” refers to an optical phenomenon that allows for the analysis of real-time interactions by detection of alterations in protein concentrations within a biosensor matrix, for example, using the BiaCore system (GE Healthcare Life Sciences).

[0283] As used herein, “antibody” refers to immunoglobulins and immunoglobulin fragments, whether natural or partially or wholly synthetically, such as recombinantly, produced, including any fragment thereof containing at least a portion of the variable heavy chain and light region of the immunoglobulin molecule that is sufficient to form an antigen binding site and, when assembled, to specifically bind antigen. Hence, an antibody includes any protein having a binding domain that is homologous or substantially homologous to an immunoglobulin antigen-binding domain (antibody combining site). For example, an antibody refers to an antibody that contains two heavy chains (which can be denoted H and H′) and two light chains (which can be denoted L and L′), where each heavy chain can be a full-length immunoglobulin heavy chain or a portion thereof sufficient to form an antigen binding site (e.g. heavy chains include, but are not limited to, VH chains, VH-CH1 chains and VH-CH1—CH2-CH3 chains), and each light chain can be a full-length light chain or a portion thereof sufficient to form an antigen binding site (e.g. light chains include, but are not limited to, VL chains and VL-CL chains). Each heavy chain (H and H′) pairs with one light chain (L and L′, respectively). Typically, antibodies minimally include all or at least a portion of the variable heavy (VH) chain and/or the variable light (VL) chain. The antibody also can include all or a portion of the constant region.

[0284] For purposes herein, the term antibody includes full-length antibodies and portions thereof including antibody fragments, such as anti-EGFR antibody fragments. Antibody fragments, include, but not limited to, Fab fragments, Fab′ fragments, F(ab′)₂ fragments, Fv fragments, disulfide-linked Fvs (dsFv), Fd fragments, Fd′ fragments, single-chain Fvs (scFv), single-chain Fabs (scFab), diabodies, anti-idiotypic (anti-Id) antibodies, or antigen-binding fragments of any of the above. Antibody also includes synthetic antibodies, recombinantly produced antibodies, multispecific antibodies (e.g., bispecific antibodies), human antibodies, non-human antibodies, humanized antibodies, chimeric antibodies, and intrabodies. Antibodies provided herein include members of any immunoglobulin type (e.g., IgG, IgM, IgD, IgE, IgA and IgY), any class (e.g. IgG1, IgG2, IgG3, IgG4, IgA1 and IgA2) or subclass (e.g., IgG2a and IgG2b).

[0285] As used herein, a form of an antibody refers to a particular structure of an antibody. Antibodies herein include full length antibodies and portions thereof, such as, for example, an Fab fragment or other antibody fragment. Thus, an Fab is a particular form of an antibody.

[0286] As used herein, reference to a “corresponding form” of an antibody means that when comparing a property or activity of two antibodies, the property is compared using the same form of the antibody. For example, if it's stated that an antibody has less activity compared to the activity of the corresponding form of a first antibody, that means that a particular form, such as an Fab of that antibody, has less activity compared to the Fab form of the first antibody.

[0287] As used herein, a full-length antibody is an antibody having two full-length heavy chains (e.g. VH-CH1-CH2-CH3 or VH-CH1—CH2-CH3—CH4) and two full-length light chains (VL-CL) and hinge regions, such as human antibodies produced by antibody secreting B cells and antibodies with the same domains that are produced synthetically.

[0288] As used herein, antibody fragment or antibody portion refers to any portion of a full-length antibody that is less than full length but contains at least a portion of the variable region of the antibody sufficient to form an antigen binding site (e.g. one or more CDRs) and thus retains the binding specificity and/or an activity of the full-length antibody; antibody fragments include antibody derivatives produced by enzymatic treatment of full-length antibodies, as well as synthetically, e.g. recombinantly produced derivatives. Examples of antibody fragments include, but are not limited to, Fab, Fab′, F(ab)₂, single-chain Fvs (scFv), Fv, dsFv, diabody, Fd and Fd fragments (see, for example, Methods in Molecular Biology, Vol 207: Recombinant Antibodies for Cancer Therapy Methods and Protocols (2003); Chapter 1; p 3-25, Kipriyanov). The fragment can include multiple chains linked together, such as by disulfide bridges and/or by peptide linkers. An antibody fragment generally contains at least about 50 amino acids and typically at least 200 amino acids.

[0289] As used herein, an Fv antibody fragment is composed of one variable heavy domain (V_{H}) and one variable light (V_{L}) domain linked by noncovalent interactions.

[0290] As used herein, a dsFv refers to an Fv with an engineered intermolecular disulfide bond, which stabilizes the V_{H}-V_{L} pair.

[0291] As used herein, an Fd fragment is a fragment of an antibody containing a variable domain (V_{H}) and one constant region domain (C_{H}1) of an antibody heavy chain.

[0292] As used herein, a Fab fragment is an antibody fragment that results from digestion of a full-length immunoglobulin with papain, or a fragment having the same structure that is produced synthetically, e.g. by recombinant methods. A Fab fragment contains a light chain (containing a V_{L} and C_{L}) and another chain containing a variable domain of a heavy chain (V_{H}) and one constant region domain of the heavy chain (C_{H}1).

[0293] As used herein, a F(ab′)₂ fragment is an antibody fragment that results from digestion of an immunoglobulin with pepsin at pH 4.0-4.5, or a fragment having the same structure that is produced synthetically, e.g. by recombinant methods. The F(ab′)₂ fragment essentially contains two Fab fragments where each heavy chain portion contains an additional few amino acids, including cysteine residues that form disulfide linkages joining the two fragments.

[0294] As used herein, a Fab′ fragment is a fragment containing one half (one heavy chain and one light chain) of the F(ab′)₂ fragment.

[0295] As used herein, an Fd′ fragment is a fragment of an antibody containing one heavy chain portion of a F(ab′)₂ fragment.

[0296] As used herein, an Fv′ fragment is a fragment containing only the V_{H} and V_{L} domains of an antibody molecule.

[0297] As used herein, hsFv refers to antibody fragments in which the constant domains normally present in a Fab fragment have been substituted with a heterodimeric coiled-coil domain (see, e.g., Arndt et al. (2001) J Mol Biol. 7:312:221-228).

[0298] As used herein, an scFv fragment refers to an antibody fragment that contains a variable light chain (V_{L}) and variable heavy chain (V_{H}), covalently connected by a polypeptide linker in any order. The linker is of a length such that the two variable domains are bridged without substantial interference. Exemplary linkers are (Gly Ser)ₙ residues with some Glu or Lys residues dispersed throughout to increase solubility.

[0299] As used herein, diabodies are dimeric scFv; diabodies typically have shorter peptide linkers than scFvs, and preferentially dimerize.

[0300] As used herein, a polypeptide “domain” is a part of a polypeptide (a sequence of three or more, generally 5, 10 or more amino acids) that is structurally and/or functionally distinguishable or definable. Exemplary of a polypeptide domain is a part of the polypeptide that can form an independently folded structure within a polypeptide made up of one or more structural motifs (e.g. combinations of alpha helices and/or beta strands connected by loop regions) and/or that is recognized by a particular functional activity, such as enzymatic activity, dimerization or antigen-binding. A polypeptide can have one or more, typically more than one, distinct domains. For example, the polypeptide can have one or more structural domains and one or more functional domains. A single polypeptide domain can be distinguished based on structure and function. A domain can encompass a contiguous linear sequence of amino acids. Alternatively, a domain can encompass a plurality of non-contiguous amino acid portions, which are non-contiguous along the linear sequence of amino acids of the polypeptide. Typically, a polypeptide contains a plurality of domains. For example, each heavy chain and each light chain of an antibody molecule contains a plurality of immunoglobulin (Ig) domains, each about 110 amino acids in length. Those of skill in the art are familiar with polypeptide domains and can identify them by virtue of structural and/or functional homology with other such domains. For exemplification herein, definitions are provided, but it is understood that it is well within the skill in the art to recognize particular domains by name. If needed, appropriate software can be employed to identify domains.

[0301] As used herein, a functional region of a polypeptide is a region of the polypeptide that contains at least one functional domain (which imparts a particular function, such as an ability to interact with a biomolecule, for example, through antigen-binding, DNA binding, ligand binding, or dimerization, or by enzymatic activity, for example, kinase activity or proteolytic activity); exemplary of functional regions of polypeptides are antibody domains, such as V_{H}, V_{L}, C_{H}, C_{L}, and portions thereof, such as CDRs, including CDR1, CDR2 and CDR3, or antigen-binding portions, such as antibody combining sites.

[0302] As used herein, a structural region of a polypeptide is a region of the polypeptide that contains at least one structural domain.

[0303] As used herein, an Ig domain is a domain, recognized as such by those in the art, that is distinguished by a structure, called the Immunoglobulin (Ig) fold, which contains two beta-pleated sheets, each containing anti-parallel beta strands of amino acids connected by loops. The two beta sheets in the Ig fold are sandwiched together by hydrophobic interactions and a conserved intra-chain disulfide bond. Individual immunoglobulin domains within an antibody chain further can be distinguished based on function. For example, a light chain contains one variable region domain (VL) and one constant region domain (CL), while a heavy chain contains one variable region domain (VH) and three or four constant region domains (CH). Each VL, CL, VH, and CH domain is an example of an immunoglobulin domain.

[0304] As used herein, a variable domain with reference to an antibody is a specific Ig domain of an antibody heavy or light chain that contains a sequence of amino acids that varies among different antibodies. Each light chain and each heavy chain has one variable region domain (VL and VH). The variable domains provide antigen specificity, and thus are responsible for antigen recognition. Each variable region contains CDRs that are part of the antigen binding site domain and framework regions (FRs).

[0305] As used herein, “hypervariable region,” “HV,” “complementarity-determining region,” “CDR” and “antibody CDR” are used interchangeably to refer to one of a plurality of portions within each variable region that together form an antigen binding site of an antibody. Each variable region domain contains three CDRs, named CDR1, CDR2, and CDR3. The three CDRs are non-contiguous along the linear amino acid sequence, but are proximate in the folded polypeptide. The CDRs are located within the loops that join the parallel strands of the beta sheets of the variable domain.

[0306] As used herein, “antigen-binding domain,” “antigen-binding site,” “antigen combining site” and “antibody combining site” are used synonymously to refer to a domain within an antibody that recognizes and physically interacts with cognate antigen. A native conventional full-length antibody molecule has two conventional antigen-binding sites, each containing portions of a heavy chain variable region and portions of a light chain variable region. A conventional antigen-binding site contains the loops that connect the anti-parallel beta strands within the variable region domains. The antigen combining sites can contain other portions of the variable region domains. Each conventional antigen-binding site contains three hypervariable regions from the heavy chain and three hypervariable regions from the light chain. The hypervariable regions also are called complementarity-determining regions (CDRs).

[0307] As used herein, “portion thereof” with reference to an antibody heavy or light chain or variable heavy or light chain refers to a contiguous portion thereof that is sufficient to form an antigen binding site such that, when assembled into an antibody containing a heavy and light chain, it contains at least 1 or 2, typically 3, 4, 5 or all 6 CDRs of the variable heavy (VH) and variable light (VL) chains sufficient to retain at least a portion of the binding specificity of the corresponding full-length antibody containing all 6 CDRs. Generally, a sufficient antigen binding site requires CDR3 of the heavy chain (CDRH3). It typically further requires the CDR3 of the light chain (CDRL3). As described herein, one of skill in the art knows and can identify the CDRs based on Kabat or Chothia numbering (see e.g., Kabat, E. A. et al. (1991) Sequences of Proteins of Immunological Interest, Fifth Edition, U.S. Department of Health and Human Services, NIH Publication No. 91-3242, and Chothia, C. et al. (1987) J. Mol. Biol. 196:901-917).

[0308] As used herein, framework regions (FRs) are the domains within the antibody variable region domains that are located within the beta sheets; the FR regions are comparatively more conserved, in terms of their amino acid sequences, than the hypervariable regions.

[0309] As used herein, a constant region domain is a domain in an antibody heavy or light chain that contains a sequence of amino acids that is comparatively more conserved among antibodies than the variable region domain. Each light chain has a single light chain constant region (CL) domain and each heavy chain contains one or more heavy chain constant region (CH) domains, which include, CH1, CH2, CH3 and CH4. Full-length IgA, IgD and IgG isotypes contain CH1, CH2, CH3 and a hinge region, while IgE and IgM contain CH1, CH2, CH3 and CH4. CH1 and CL domains extend the Fab arm of the antibody molecule, thus contributing to the interaction with antigen and rotation of the antibody arms. Antibody constant regions can serve effector functions, such as, but not limited to, clearance of antigens, pathogens and toxins to which the antibody specifically binds, e.g. through interactions with various cells, biomolecules and tissues.

[0310] As used herein, “Kabat numbering” refers to the index numbering of the IgG 1 Kabat antibody (see e.g., Kabat, E. A. et al. (1991) Sequences of Proteins of Immunological Interest, Fifth Edition, U.S. Department of Health and Human Services, NIH Publication No. 91-3242). For example, based on Kabat numbering, CDR-L1 corresponds to residues L24-L34; CDR-L2 corresponds to residues L50-L56; CDR-L3 corresponds to residues L89-L97; CDR-H1 corresponds to residues H31 H35, 35a or 35b depending on the length; CDR-H2 corresponds to residues H50-H65; and CDR-H3 corresponds to residues H95-H102. One of skill in the art can identify regions of the constant region using Kabat. Tables 1 and 2 set forth corresponding residues using kabat numbering and EU numbering schemes for the exemplary antibody cetuximab.

[0311] As used herein, “EU numbering” or “EU index” refer to the numbering scheme of the EU antibody described in Edelman et al., Proc Natl. Acad. Sci. USA 63 (1969) 78-85. “EU index as in Kabat” refers to EU index numbering of the human IgG1 Kabat antibody as set forth in Kabat, E. A. et al. (1991) Sequences of Proteins of Immunological Interest, Fifth Edition, U.S. Department of Health and Human Services, NIH Publication No. 91-3242. EU numbering or EU numbering as in Kabat are frequently used by those of skill in the art to number amino acid residues of the Fc regions of the light and heavy antibody chains. For example, One of skill in the art can identify regions of the constant region using EU numbering. For example, the CL domain corresponds to residues L108-L216 according to Kabat numbering or L108-L214 according to EU numbering. CH1 corresponds to residues 118-215 (EU numbering) or 114-223 (Kabat numbering); CH2 corresponds to residues 231-340 (EU numbering) or 244-360 (Kabat numbering); CH3 corresponds to residues 341-446 (EU numbering) or 361-478 (Kabat numbering) domain corresponds to; CDR-L2 corresponds to residues L50-L56; CDR-L3 corresponds to residues L89-L97; CDR-H1 corresponds to residues H31-H35, 35a or 35b depending on the length; CDR-H2 corresponds to residues H50-H65; and CDR-H3 corresponds to residues H95-H102. Tables 1 and 2 set forth corresponding residues using Kabat and EU numbering for the exemplary antibody cetuximab. The top row (bold) sets forth the amino acid residue number; the second row (bold) provides the 1-letter code for the amino acid residue at the position indicated by the number in the top row; the third row (italic) indicates the corresponding Kabat number according to Kabat numbering; and the fourth row (not-bold, not-italic) indicates the corresponding EU index number according to EU numbering.

TABLE 1
Kabat and EU Numbering of Cetuximab Light Chain

| 1 | 2 | 3 | 4 | 5 | 6 | 7 | 8 | 9 | 10 | 11 | 12 | 13 | 14 | 15 |
|---|---|---|---|---|---|---|---|---|---|---|---|---|---|---|
| D | I | L | L | T | Q | S | P | V | I | L | S | V | S | P |
| 1 | 2 | 3 | 4 | 5 | 6 | 7 | 8 | 9 | 10 | 11 | 12 | 13 | 14 | 15 |
| 1 | 2 | 3 | 4 | 5 | 6 | 7 | 8 | 9 | 10 | 11 | 12 | 13 | 14 | 15 |
| 16 | 17 | 18 | 19 | 20 | 21 | 22 | 23 | 24 | 25 | 26 | 27 | 28 | 29 | 30 |
| G | E | R | V | S | F | S | C | R | A | S | Q | S | I | G |
| 16 | 17 | 18 | 19 | 20 | 21 | 22 | 23 | 24 | 25 | 26 | 27 | 28 | 29 | 30 |
| 16 | 17 | 18 | 19 | 20 | 21 | 22 | 23 | 24 | 25 | 26 | 27 | 28 | 29 | 30 |
| 31 | 32 | 33 | 34 | 35 | 36 | 37 | 38 | 39 | 40 | 41 | 42 | 43 | 44 | 45 |
| T | N | I | H | W | Y | Q | Q | R | T | N | G | S | P | R |
| 31 | 32 | 33 | 34 | 35 | 36 | 37 | 38 | 39 | 40 | 41 | 42 | 43 | 44 | 45 |
| 31 | 32 | 33 | 34 | 35 | 36 | 37 | 38 | 39 | 40 | 41 | 42 | 43 | 44 | 45 |
| 46 | 47 | 48 | 49 | 50 | 51 | 52 | 53 | 54 | 55 | 56 | 57 | 58 | 59 | 60 |
| L | L | I | K | Y | A | S | E | S | I | S | G | I | P | S |
| 46 | 47 | 48 | 49 | 50 | 51 | 52 | 53 | 54 | 55 | 56 | 57 | V58 | 59 | 60 |
| 46 | 47 | 48 | 49 | 50 | 51 | 52 | 53 | 54 | 55 | 56 | 57 | 58 | 59 | 60 |
| 61 | 62 | 63 | 64 | 65 | 66 | 67 | 68 | 69 | 70 | 71 | 72 | 73 | 74 | 75 |
| R | F | S | G | S | G | S | G | T | D | F | T | L | S | I |
| 61 | 62 | 63 | 64 | 65 | 66 | 67 | 68 | 69 | 70 | 71 | 72 | 73 | 74 | 75 |
| 61 | 62 | 63 | 64 | 65 | 66 | 67 | 68 | 69 | 70 | 71 | 72 | 73 | 74 | 75 |
| 76 | 77 | 78 | 79 | 80 | 81 | 82 | 83 | 84 | 85 | 86 | 87 | 88 | 89 | 90 |
| N | S | V | E | S | E | D | I | A | D | Y | Y | C | Q | Q |
| 76 | 77 | 78 | 79 | 80 | 81 | 82 | 83 | 84 | 85 | 86 | 87 | 88 | 89 | 90 |
| 76 | 77 | 78 | 79 | 80 | 81 | 82 | 83 | 84 | 85 | 86 | 87 | 88 | 89 | 90 |
| 91 | 92 | 93 | 94 | 95 | 96 | 97 | 98 | 99 | 100 | 101 | 102 | 103 | 104 | 105 |
| N | N | N | W | P | T | T | F | G | A | G | T | K | L | E |
| 91 | 92 | 93 | 94 | 95 | 96 | 97 | 98 | 99 | 100 | 101 | 102 | 103 | 104 | 105 |
| 91 | 92 | 93 | 94 | 95 | 96 | 97 | 98 | 99 | 100 | 101 | 102 | 103 | 104 | 105 |
| 106 | 107 | 108 | 109 | 110 | 111 | 112 | 113 | 114 | 115 | 116 | 117 | 118 | 119 | 120 |
| L | K | R | T | V | A | A | P | S | V | F | I | F | P | P |
| 106 | 107 | 108 | 109 | 110 | 111 | 112 | 113 | 114 | 115 | 116 | 117 | 118 | 119 | 120 |
| 106 | 107 | 108 | 109 | 110 | 111 | 112 | 113 | 114 | 115 | 116 | 117 | 118 | 119 | 120 |
| 121 | 122 | 123 | 124 | 125 | 126 | 127 | 128 | 129 | 130 | 131 | 132 | 133 | 134 | 135 |
| S | D | E | Q | L | K | S | G | T | A | S | V | V | C | L |
| 121 | 122 | 123 | 124 | 125 | 126 | 127 | 128 | 129 | 130 | 131 | 132 | 133 | 134 | 135 |
| 121 | 122 | 123 | 124 | 125 | 126 | 127 | 128 | 129 | 130 | 131 | 132 | 133 | 134 | 135 |
| 136 | 137 | 138 | 139 | 140 | 141 | 142 | 143 | 144 | 145 | 146 | 147 | 148 | 149 | 150 |
| L | N | N | F | Y | P | R | E | A | K | V | Q | W | K | V |
| 136 | 137 | 138 | 139 | 140 | 141 | 142 | 143 | 144 | 145 | 146 | 147 | 148 | 149 | 150 |
| 136 | 137 | 138 | 139 | 140 | 141 | 142 | 143 | 144 | 145 | 146 | 147 | 148 | 149 | 150 |
| 151 | 152 | 153 | 154 | 155 | 156 | 157 | 158 | 159 | 160 | 161 | 162 | 163 | 164 | 165 |
| D | N | A | L | Q | S | G | N | S | Q | E | S | V | T | E |
| 151 | 152 | 153 | 154 | 155 | 156 | 157 | 158 | 159 | 160 | 161 | 162 | 163 | 164 | 165 |
| 151 | 152 | 153 | 154 | 155 | 156 | 157 | 158 | 159 | 160 | 161 | 162 | 163 | 164 | 165 |
| 166 | 167 | 168 | 169 | 170 | 171 | 172 | 173 | 174 | 175 | 176 | 177 | 178 | 179 | 180 |
| Q | D | S | K | VD | S | T | Y | S | L | S | S | T | L | T |
| 166 | 167 | 168 | 169 | 170 | 171 | 172 | 173 | 174 | 175 | 176 | 177 | 178 | 179 | 180 |
| 166 | 167 | 168 | 169 | 170 | 171 | 172 | 173 | 174 | 175 | 176 | 177 | 178 | 179 | 180 |
| 181 | 182 | 183 | 184 | 185 | 186 | 187 | 188 | 189 | 190 | 191 | 192 | 193 | 194 | 195 |
| L | S | K | A | D | Y | E | K | H | K | V | Y | A | C | VE |
| 181 | 182 | 183 | 184 | 185 | 186 | 187 | 188 | 189 | 190 | 191 | 192 | 193 | 194 | 195 |
| 181 | 182 | 183 | 184 | 185 | 186 | 187 | 188 | 189 | 190 | 191 | 192 | 193 | 194 | 195 |
| 196 | 197 | 198 | 199 | 200 | 201 | 202 | 203 | 204 | 205 | 206 | 207 | 208 | 209 | 210 |
| V | T | H | Q | G | L | S | S | P | V | T | K | S | F | N |
| 196 | 197 | 198 | 199 | 200 | 201 | 202 | 203 | 204 | 205 | 206 | 207 | 208 | 209 | 210 |
| 196 | 197 | 198 | 199 | 200 | 201 | 202 | 203 | 204 | 205 | 206 | 207 | 208 | 209 | 210 |
| 211 | 212 | 213 | | | | | | | | | | | | |
| R | G | A | | | | | | | | | | | | |
| 211 | 212 | 213 | | | | | | | | | | | | |
| 211 | 212 | 213 | | | | | | | | | | | | |

TABLE 2
Kabat and EU Numbering of Cetuximab Heavy Chain

| 1 | 2 | 3 | 4 | 5 | 6 | 7 | 8 | 9 | 10 | 11 | 12 | 13 | 14 | 15 |
|---|---|---|---|---|---|---|---|---|---|---|---|---|---|---|
| Q | V | Q | L | K | Q | S | G | P | G | L | V | Q | P | S |
| 1 | 2 | 3 | 4 | 5 | 6 | 7 | 8 | 9 | 10 | 11 | 12 | 13 | 14 | 15 |
| 1 | 2 | 3 | 4 | 5 | 6 | 7 | 8 | 9 | 10 | 11 | 12 | 13 | 14 | 15 |
| 16 | 17 | 18 | 19 | 20 | 21 | 22 | 23 | 24 | 25 | 26 | 27 | 28 | 29 | 30 |
| Q | VS | L | S | I | T | C | T | V | S | G | F | S | L | T |
| 16 | 17 | 18 | 19 | 20 | 21 | 22 | 23 | 24 | 25 | 26 | 27 | 28 | 29 | 30 |
| 16 | 17 | 18 | 19 | 20 | 21 | 22 | 23 | 24 | 25 | 26 | 27 | 28 | 29 | 30 |
| 31 | 32 | 33 | 34 | 35 | 36 | 37 | 38 | 39 | 40 | 41 | 42 | 43 | 44 | 45 |
| N | Y | G | V | H | W | V | R | Q | S | P | G | K | G | L |
| 31 | 32 | 33 | 34 | 35 | 36 | 37 | 38 | 39 | 40 | 41 | 42 | 43 | 44 | 45 |
| 31 | 32 | 33 | 34 | 35 | 36 | 37 | 38 | 39 | 40 | 41 | 42 | 43 | 44 | 45 |
| 46 | 47 | 48 | 49 | 50 | 51 | 52 | 53 | 54 | 55 | 56 | 57 | 58 | 59 | 60 |
| E | W | L | G | V | I | W | S | G | G | N | T | D | Y | N |
| 46 | 47 | 48 | 49 | 50 | 51 | 52 | 53 | 54 | 55 | 56 | 57 | 58 | 59 | 60 |
| 46 | 47 | 48 | 49 | 51 | 52 | 53 | 54 | 55 | 56 | 57 | 58 | 59 | 60 | 61 |
| 61 | 62 | 63 | 64 | 65 | 66 | 67 | 68 | 69 | 70 | 71 | 72 | 73 | 74 | 75 |
| T | P | F | T | S | R | L | S | I | N | K | D | N | S | K |
| 61 | 62 | 63 | 64 | 65 | 66 | 67 | 68 | 69 | 70 | 71 | 72 | 73 | 74 | 75 |
| 62 | 63 | 64 | 65 | 66 | 67 | 68 | 69 | 70 | 71 | 72 | 73 | 74 | 75 | 76 |
| 76 | 77 | 78 | 79 | 80 | 81 | 82 | 83 | 84 | 85 | 86 | 87 | 88 | 89 | 90 |
| S | Q | V | F | F | K | M | N | S | L | Q | S | N | D | T |
| 76 | 77 | 78 | 79 | 80 | 81 | 82 | 82A | 82B | 82C | 83 | 84 | 85 | 86 | 87 |
| 77 | 78 | 79 | 80 | 81 | 82 | 83 | 84 | 85 | 86 | 87 | 88 | 89 | 90 | 91 |
| 91 | 92 | 93 | 94 | 95 | 96 | 97 | 98 | 99 | 100 | 101 | 102 | 103 | 104 | 105 |
| A | I | Y | Y | C | A | R | A | L | T | Y | Y | D | Y | E |
| 88 | 89 | 90 | 91 | 92 | 93 | 94 | 95 | 96 | 97 | 98 | 99 | 100 | 100A | 100B |
| 92 | 93 | 94 | 95 | 96 | 97 | 98 | 99 | 100 | 101 | 102 | 103 | 104 | 105 | 106 |
| 106 | 107 | 108 | 109 | 110 | 111 | 112 | 113 | 114 | 115 | 116 | 117 | 118 | 119 | 120 |
| F | A | Y | W | G | Q | G | T | L | V | T | V | S | A | A |
| 100C | 101 | 102 | 103 | 104 | 105 | 106 | 107 | 108 | 109 | 110 | 111 | 112 | 113 | 114 |
| — | 107 | 108 | 109 | 110 | — | 111 | — | 112 | 113 | 114 | 115 | 116 | 117 | 118 |
| 121 | 122 | 123 | 124 | 125 | 126 | 127 | 128 | 129 | 130 | 131 | 132 | 133 | 134 | 135 |
| S | T | K | G | P | S | V | F | P | L | A | P | S | S | K |
| 115 | 116 | 117 | 118 | 119 | 120 | 121 | 122 | 123 | 124 | 125 | 126 | 127 | 128 | 129 |
| 119 | 120 | 121 | 122 | 123 | 124 | 125 | 126 | 127 | 128 | 129 | 130 | 131 | 132 | 133 |
| 136 | 137 | 138 | 139 | 140 | 141 | 142 | 143 | 144 | 145 | 146 | 147 | 148 | 149 | 150 |
| S | T | S | G | G | T | A | A | L | G | C | L | V | K | D |
| 130 | 133 | 134 | 135 | 136 | 137 | 138 | 139 | 140 | 141 | 142 | 143 | 144 | 145 | 146 |
| 134 | 135 | 136 | 137 | 138 | 139 | 140 | 141 | 142 | 143 | 144 | 145 | 146 | 147 | 148 |
| 151 | 152 | 153 | 154 | 155 | 156 | 157 | 158 | 159 | 160 | 161 | 162 | 163 | 164 | 165 |
| Y | F | P | E | P | V | T | V | S | W | N | S | G | A | L |
| 147 | 148 | 149 | 150 | 151 | 152 | 153 | 154 | 156 | 157 | 162 | 163 | 164 | 165 | 166 |
| 149 | 150 | 151 | 152 | 153 | 154 | 155 | 156 | 157 | 158 | 159 | 160 | 161 | 162 | 163 |
| 166 | 167 | 168 | 169 | 170 | 171 | 172 | 173 | 174 | 175 | 176 | 177 | 178 | 179 | 180 |
| T | S | G | V | H | T | F | P | A | V | L | Q | S | S | G |
| 167 | 168 | 169 | 171 | 172 | 173 | 174 | 175 | 176 | 177 | 178 | 179 | 180 | 182 | 183 |
| 164 | 165 | 166 | 167 | 168 | 169 | 170 | 171 | 172 | 173 | 174 | 175 | 176 | 177 | 178 |
| 181 | 182 | 183 | 184 | 185 | 186 | 187 | 188 | 189 | 190 | 191 | 192 | 193 | 194 | 195 |
| L | Y | S | L | S | S | V | V | T | V | P | S | S | S | L |
| 184 | 185 | 186 | 187 | 188 | 189 | 190 | 191 | 192 | 193 | 194 | 195 | 196 | 197 | 198 |
| 179 | 180 | 181 | 182 | 183 | 184 | 185 | 186 | 187 | 188 | 189 | 190 | 191 | 192 | 193 |
| 196 | 197 | 198 | 199 | 200 | 201 | 202 | 203 | 204 | 205 | 206 | 207 | 208 | 209 | 210 |
| G | T | Q | T | Y | I | C | N | V | N | H | K | P | S | N |
| 199 | 200 | 203 | 205 | 206 | 207 | 208 | 209 | 210 | 211 | 212 | 213 | 214 | 215 | 216 |
| 194 | 195 | 196 | 197 | 198 | 199 | 200 | 201 | 202 | 203 | 204 | 205 | 206 | 207 | 208 |
| 211 | 212 | 213 | 214 | 215 | 216 | 217 | 218 | 219 | 220 | 221 | 222 | 223 | 224 | 225 |
| T | K | V | D | K | R | V | E | P | K | S | C | D | K | T |
| 217 | 218 | 219 | 220 | 221 | 222 | 223 | 226 | 227 | 228 | 232 | 233 | 234 | 235 | 236 |
| 209 | 210 | 211 | 212 | 213 | 214 | 215 | 216 | 217 | 218 | 219 | 220 | 221 | 222 | 223 |
| 226 | 227 | 228 | 229 | 230 | 231 | 232 | 233 | 234 | 235 | 236 | 237 | 238 | 239 | 240 |
| H | T | C | P | P | C | P | A | P | E | L | L | G | G | P |
| 237 | 238 | 239 | 240 | 241 | 242 | 243 | 244 | 245 | 246 | 247 | 248 | 249 | 250 | 251 |
| 224 | 225 | 226 | 227 | 228 | 229 | 230 | 231 | 232 | 233 | 234 | 235 | 236 | 237 | 238 |
| 241 | 242 | 243 | 244 | 245 | 246 | 247 | 248 | 249 | 250 | 251 | 252 | 253 | 254 | 255 |
| S | V | F | L | F | P | P | K | P | K | D | T | L | M | I |
| 252 | 253 | 254 | 255 | 256 | 257 | 258 | 259 | 260 | 261 | 262 | 263 | 264 | 265 | 266 |
| 239 | 240 | 241 | 242 | 243 | 244 | 245 | 246 | 247 | 248 | 249 | 250 | 251 | 252 | 253 |
| 256 | 257 | 258 | 259 | 260 | 261 | 262 | 263 | 264 | 265 | 266 | 267 | 268 | 269 | 270 |
| S | R | T | P | E | V | T | C | V | V | V | D | V | S | H |
| 267 | 268 | 269 | 270 | 271 | 272 | 273 | 274 | 275 | 276 | 277 | 278 | 279 | 280 | 281 |
| 254 | 255 | 256 | 257 | 258 | 259 | 260 | 261 | 262 | 263 | 264 | 265 | 266 | 267 | 268 |
| 271 | 272 | 273 | 274 | 275 | 276 | 277 | 278 | 279 | 280 | 281 | 282 | 283 | 284 | 285 |
| E | D | P | E | V | K | F | N | W | Y | V | D | G | V | E |
| 282 | 283 | 284 | 285 | 286 | 287 | 288 | 289 | 290 | 291 | 292 | 295 | 296 | 299 | 300 |
| 269 | 270 | 271 | 272 | 273 | 274 | 275 | 276 | 277 | 278 | 279 | 280 | 281 | 282 | 283 |
| 286 | 287 | 288 | 289 | 290 | 291 | 292 | 293 | 294 | 295 | 296 | 297 | 298 | 299 | 300 |
| V | H | N | A | K | T | K | P | R | E | E | Q | Y | N | S |
| 301 | 302 | 303 | 304 | 305 | 306 | 307 | 308 | 309 | 310 | 311 | 312 | 313 | 314 | 317 |
| 284 | 285 | 286 | 287 | 288 | 289 | 290 | 291 | 292 | 293 | 294 | 295 | 296 | 297 | 298 |
| 301 | 302 | 303 | 304 | 305 | 306 | 307 | 308 | 309 | 310 | 311 | 312 | 313 | 314 | 315 |
| T | Y | R | V | V | S | V | L | T | V | L | H | Q | D | W |
| 318 | 319 | 320 | 321 | 322 | 323 | 324 | 325 | 326 | 327 | 328 | 329 | 330 | 331 | 332 |
| 299 | 300 | 301 | 302 | 303 | 304 | 305 | 306 | 307 | 308 | 309 | 310 | 311 | 312 | 313 |
| 316 | 317 | 318 | 319 | 320 | 321 | 322 | 323 | 324 | 325 | 326 | 327 | 328 | 329 | 330 |
| L | N | G | K | E | Y | K | C | K | V | S | N | K | A | L |
| 333 | 334 | 335 | 336 | 337 | 338 | 339 | 340 | 341 | 342 | 343 | 344 | 345 | 346 | 347 |
| 314 | 315 | 316 | 317 | 318 | 319 | 320 | 321 | 322 | 323 | 324 | 325 | 326 | 327 | 328 |
| 331 | 332 | 333 | 334 | 335 | 336 | 337 | 338 | 339 | 340 | 341 | 342 | 343 | 344 | 345 |
| P | A | P | I | E | K | T | I | S | K | A | K | G | Q | P |
| 348 | 349 | 350 | 351 | 352 | 353 | 354 | 355 | 357 | 358 | 359 | 360 | 361 | 363 | 364 |
| 329 | 330 | 331 | 332 | 333 | 334 | 335 | 336 | 337 | 338 | 339 | 340 | 341 | 342 | 343 |
| 346 | 347 | 348 | 349 | 350 | 351 | 352 | 353 | 354 | 355 | 356 | 357 | 358 | 359 | 360 |
| R | E | P | Q | V | Y | T | L | P | P | S | R | D | E | L |
| 365 | 366 | 367 | 368 | 369 | 370 | 371 | 372 | 373 | 374 | 375 | 376 | 377 | 378 | 381 |
| 344 | 345 | 346 | 347 | 348 | 349 | 350 | 351 | 352 | 353 | 354 | 355 | 356 | 357 | 358 |
| 361 | 362 | 363 | 364 | 365 | 366 | 367 | 368 | 369 | 370 | 371 | 372 | 373 | 374 | 375 |
| T | K | N | Q | V | S | L | T | C | L | V | K | G | F | Y |
| 382 | 383 | 384 | 385 | 386 | 387 | 388 | 389 | 390 | 391 | 392 | 393 | 394 | 395 | 396 |
| 359 | 360 | 361 | 362 | 363 | 364 | 365 | 366 | 367 | 368 | 369 | 370 | 371 | 372 | 373 |
| 376 | 377 | 378 | 379 | 380 | 381 | 382 | 383 | 384 | 385 | 386 | 387 | 388 | 389 | 390 |
| P | S | D | I | A | V | E | W | E | S | N | G | Q | P | E |
| 397 | 398 | 399 | 400 | 401 | 402 | 405 | 406 | 407 | 408 | 410 | 411 | 414 | 415 | 416 |
| 374 | 375 | 376 | 377 | 378 | 379 | 380 | 381 | 382 | 383 | 384 | 385 | 386 | 387 | 388 |
| 391 | 392 | 393 | 394 | 395 | 396 | 397 | 398 | 399 | 400 | 401 | 402 | 403 | 404 | 405 |
| N | N | Y | K | T | T | P | P | V | L | D | S | D | G | S |
| 417 | 418 | 419 | 420 | 421 | 422 | 423 | 424 | 425 | 426 | 427 | 428 | 430 | 433 | 434 |
| 389 | 390 | 391 | 392 | 393 | 394 | 395 | 396 | 397 | 398 | 399 | 400 | 401 | 402 | 403 |
| 406 | 407 | 408 | 409 | 410 | 411 | 412 | 413 | 414 | 415 | 416 | 417 | 418 | 419 | 420 |
| F | F | L | Y | S | K | L | T | V | D | K | S | R | W | Q |
| 435 | 436 | 437 | 438 | 439 | 440 | 441 | 442 | 443 | 444 | 445 | 446 | 447 | 448 | 449 |
| 404 | 405 | 406 | 407 | 408 | 409 | 410 | 411 | 412 | 413 | 414 | 415 | 416 | 417 | 418 |
| 421 | 422 | 423 | 424 | 425 | 426 | 427 | 428 | 429 | 430 | 431 | 432 | 433 | 434 | 435 |
| Q | G | N | V | F | S | C | S | V | M | H | E | A | L | H |
| 450 | 451 | 452 | 453 | 454 | 455 | 456 | 457 | 458 | 459 | 460 | 461 | 462 | 463 | 464 |
| 419 | 420 | 421 | 422 | 423 | 424 | 425 | 426 | 427 | 428 | 429 | 430 | 431 | 432 | 433 |
| 436 | 437 | 438 | 439 | 440 | 441 | 442 | 443 | 444 | 445 | 446 | 447 | 448 | 449 | |
| N | H | Y | T | Q | K | S | L | S | L | S | P | G | K | |
| 465 | 466 | 467 | 468 | 469 | 470 | 471 | 472 | 473 | 474 | 475 | 476 | 477 | 478 | |
| 434 | 435 | 421 | 422 | 423 | 424 | 425 | 426 | 427 | 428 | 429 | 430 | 431 | 432 | |

[0312] As used herein, “antibody hinge region” or “hinge region” refers to a polypeptide region that exists naturally in the heavy chain of the gamma, delta and alpha antibody isotypes, between the C_{H}1 and C_{H}2 domains that has no homology with the other antibody domains. This region is rich in proline residues and gives the IgG, IgD and IgA antibodies flexibility, allowing the two “arms” (each containing one antibody combining site) of the Fab portion to be mobile, assuming various angles with respect to one another as they bind antigen. This flexibility allows the Fab arms to move in order to align the antibody combining sites to interact with epitopes on cell surfaces or other antigens. Two interchain disulfide bonds within the hinge region stabilize the interaction between the two heavy chains. In some embodiments provided herein, the synthetically produced antibody fragments contain one or more hinge regions, for example, to promote stability via interactions between two antibody chains. Hinge regions are exemplary of dimerization domains.

[0313] As used herein, the phrase “derived from” when referring to antibody fragments derived from another antibody, such as a monoclonal antibody, refers to the engineering of antibody fragments (e.g., Fab, F(ab′), F(ab′)₂, single-chain Fv (scFv), Fv, dsFv, diabody, Fd and Fd′ fragments) that retain the binding specificity of the original antibody. Such fragments can be derived by a variety of methods known in the art, including, but not limited to, enzymatic cleavage, chemical crosslinking, recombinant means or combinations thereof. Generally, the derived antibody fragment shares the identical or substantially identical heavy chain variable region (V_{H}) and light chain variable region (V_{L}) of the parent antibody, such that the antibody fragment and the parent antibody bind the same epitope.

[0314] As used herein, a “parent antibody” or “source antibody” refers the to an antibody from which an antibody fragment (e.g., Fab, F(ab′), F(ab)₂, single-chain Fv (scFv), Fv, dsFv, diabody, Fd and Fd′ fragments) is derived.

[0315] As used herein, the term “epitope” refers to any antigenic determinant on an antigen to which the paratope of an antibody binds. Epitopic determinants typically contain chemically active surface groupings of molecules such as amino acids or sugar side chains and typically have specific three dimensional structural characteristics, as well as specific charge characteristics.

[0316] As used herein, humanized antibodies refer to antibodies that are modified to include “human” sequences of amino acids so that administration to a human does not provoke an immune response. A humanized antibody typically contains complementarity determining regions (CDRs or hypervariable loops) derived from a non-human species immunoglobulin and the remainder of the antibody molecule derived mainly from a human immunoglobulin. Methods for preparation of such antibodies are known. For example, DNA encoding a monoclonal antibody can be altered by recombinant DNA techniques to encode an antibody in which the amino acid composition of the non-variable regions is based on human antibodies. Methods for identifying such regions are known, including computer programs, which are designed for identifying the variable and non-variable regions of immunoglobulins. Hence, in general, the humanized antibody will comprise substantially all of at least one, and typically two, variable domains, in which all or substantially all of the hypervariable loops correspond to those of a non-human immunoglobulin and all or substantially all of the FRs are those of a human immunoglobulin sequence. The humanized antibody optionally also will comprise at least a portion of an immunoglobulin constant region (Fc), typically that of a human immunoglobulin. With respect to the variable region, a humanized antibody typically is one that exhibits greater than 56% sequence identity, such as at least 57%, 58%, 59%, 60%, 65%, 70% or more sequence identity, to the closest V_{H} region derived from a human V_{H} gene segment, and at least 75% sequence identity, such as at least 76%, 77%, 78%, 79%, 80%, 85% or more sequence identity, to the closest V_{L} region derived from a human V_{L} gene segment. Hence, a humanized antibody exhibits at least 1%, 2%, 3%, 4%, 5%, 6%, 7%, 8%, 9%, 10%, 11%, 12%, 13%, 14%, 15% or more sequence identity to its closest human V region derived from V germline segment than the parent or reference or unmodified antibody prior to humanization.

[0317] As used herein, germline gene segments refer to immunoglobulin (Ig) variable (V), diversity (D) and junction (J) or constant (C) genes from the germline that encode immunoglobulin heavy or light (kappa and lambda) chains. There are multiple V, D, J and C gene segments in the germline, but gene rearrangement results in only one segment of each occurring in each functional rearranged gene. For example, a functionally rearranged heavy chain contains one V, one D and one J and a functionally rarrangend light chain gene contains one V and one J. Hence, these gene segments are carried in the germ cells but cannot be transcribed and translated into heavy and light chains until they are arranged into functional genes. During B-cell differentiation in the bone marrow, these gene segments are randomly shuffled by a dynamic genetic system capable of generating more than 10¹⁰ specificities. For purposes herein, the gene segments are rearranged in vitro by combination or compilation of the individual germline segments.

[0318] Reference to a variable germline segment herein refers to V, D and J groups, subgroups, genes or alleles thereof. Gene segment sequences are accessible from known database (e.g., National Center for Biotechnology Information (NCBI), the international ImMunoGeneTics information System® (IMGT), the Kabat database and the Tomlinson's VBase database (Lefranc (2003) Nucleic Acids Res., 31:307-310; Martin et al., Bioinformatics Tools for Antibody Engineering in Handbook of Therapeutic Antibodies, Wiley-VCH (2007), pp. 104-107; see also published International PCT Application No. WO2010/054007).

[0319] As used herein, a “group” with reference to a germline segment refers to a core coding region from an immunoglobulin, i.e. a variable (V) gene, diversity (D) gene, joining (J) gene or constant (C) gene encoding a heavy or light chain. Exemplary of germline segment groups include V_{H}, D_{H}, J_{H}, V_{L} (V_{κ} or V_{λ}) and J_{L} (J_{κ} or J_{λ}).

[0320] As used herein, a “subgroup” with reference to a germline segment refers to a set of sequences that are defined by nucleotide sequence similarity or identity. Generally, a subgroup is a set of genes that belong to the same group [V, D, J or C], in a given species, and that share at least 75% identity at the nucleotide level. Subgroups are classified based on IMGT nomenclature (imgt.cines.fr; see e.g., Lefranc et al. (2008) Briefings in Bioinformatics, 9:263-275). Generally, a subgroup represent a multigene family.

[0321] As used herein, an allele of a gene refer to germline sequences that have sequence polymorphism due to one or more nucleotide differences in the coding region compared to a reference gene sequence (e.g. substitutions, insertions or deletions). Thus, IG sequences that belong to the same subgroup can be highly similar in their coding sequence, but nonetheless exhibit high polymorphism. Subgroup alleles are classified based on IMGT nomenclature with an asterisk(*) followed by a two figure number.

[0322] As used herein, a “family” with reference to a germline segment refers to sets of germline segment sequences that are defined by amino acid sequence similarity or identity. Generally, a germline family includes all alleles of a gene.

[0323] As used herein, reference to a V gene segment “derived from a germline segment” refers to the corresponding nucleotides in a VH or VL nucleic acid sequence, that by recombination events, derived from a V germline gene (V_{H} or V_{L} germline segment).

[0324] As used herein, reference to a V region in an antibody heavy chain (V_{H} region) or light chain (V_{L} region), or portion or fragment thereof, refers to amino acids encoded by nucleotides that, by recombination events, derive from a corresponding V germline segment gene.

[0325] As used herein, a multimerization domain refers to a sequence of amino acids that promotes stable interaction of a polypeptide molecule with one or more additional polypeptide molecules, each containing a complementary multimerization domain, which can be the same or a different multimerization domain to form a stable multimer with the first domain. Generally, a polypeptide is joined directly or indirectly to the multimerization domain. Exemplary multimerization domains include the immunoglobulin sequences or portions thereof, leucine zippers, hydrophobic regions, hydrophilic regions, and compatible protein-protein interaction domains. The multimerization domain, for example, can be an immunoglobulin constant region or domain, such as, for example, the Fc domain or portions thereof from IgG, including IgG1, IgG2, IgG3 or IgG4 subtypes, IgA, IgE, IgD and IgM and modified forms thereof.

[0326] As used herein, dimerization domains are multimerization domains that facilitate interaction between two polypeptide sequences (such as, but not limited to, antibody chains). Dimerization domains include, but are not limited to, an amino acid sequence containing a cysteine residue that facilitates formation of a disulfide bond between two polypeptide sequences, such as all or part of a full-length antibody hinge region, or one or more dimerization sequences, which are sequences of amino acids known to promote interaction between polypeptides (e.g., leucine zippers, GCN4 zippers).

[0327] As used herein, “Fc” or “Fc region” or “Fc domain” refers to a polypeptide containing the constant region of an antibody heavy chain, excluding the first constant region immunoglobulin domain. Thus, Fc refers to the last two constant region immunoglobulin domains of IgA, IgD, and IgE, or the last three constant region immunoglobulin domains of IgE and IgM. Optionally, an Fc domain can include all or part of the flexible hinge N-terminal to these domains. For IgA and IgM, Fc can include the J chain. For an exemplary Fc domain of IgG, Fc contains immunoglobulin domains Cγ2 and Cγ3, and optionally, all or part of the hinge between Cγ1 and Cγ2. The boundaries of the Fc region can vary, but typically, include at least part of the hinge region. In addition, Fc also includes any allelic or species variant or any variant or modified form, such as any variant or modified form that alters the binding to an FcR or alters an Fc-mediated effector function.

[0328] As used herein, “Fc chimera” refers to a chimeric polypeptide in which one or more polypeptides is linked, directly or indirectly, to an Fc region or a derivative thereof. Typically, an Fc chimera combines the Fc region of an immunoglobulin with another polypeptide. Derivatives of or modified Fc polypeptides are known to those of skill in the art.

[0329] As used herein, a chimeric polypeptide refers to a polypeptide that contains portions from at least two different polypeptides or from two non-contiguous portions of a single polypeptide. Thus, a chimeric polypeptide generally includes a sequence of amino acid residues from all or part of one polypeptide and a sequence of amino acids from all or part of another different polypeptide. The two portions can be linked directly or indirectly and can be linked via peptide bonds, other covalent bonds or other non-covalent interactions of sufficient strength to maintain the integrity of a substantial portion of the chimeric polypeptide under equilibrium conditions and physiologic conditions, such as in isotonic pH 7 buffered saline.

[0330] As used herein, a fusion protein is a polypeptide engineered to contain sequences of amino acids corresponding to two distinct polypeptides, which are joined together, such as by expressing the fusion protein from a vector containing two nucleic acids, encoding the two polypeptides, in close proximity, e.g., adjacent, to one another along the length of the vector. Accordingly, a fusion protein refers to a chimeric protein containing two, or portions from two, or more proteins or peptides that are linked directly or indirectly via peptide bonds. The two molecules can be adjacent in the construct or separated by a linker, or spacer polypeptide.

[0331] As used herein, “linker” or “spacer” peptide refers to short sequences of amino acids that join two polypeptide sequences (or nucleic acid encoding such an amino acid sequence). “Peptide linker” refers to the short sequence of amino acids joining the two polypeptide sequences. Exemplary of polypeptide linkers are linkers joining a peptide transduction domain to an antibody or linkers joining two antibody chains in a synthetic antibody fragment such as an scFv fragment. Linkers are well-known and any known linkers can be used in the provided methods. Exemplary of polypeptide linkers are (Gly-Ser)ₙ amino acid sequences, with some Glu or Lys residues dispersed throughout to increase solubility. Other exemplary linkers are described herein; any of these and other known linkers can be used with the provided compositions and methods.

[0332] As used herein, a “tag” or an “epitope tag” refers to a sequence of amino acids, typically added to the N- or C-terminus of a polypeptide, such as an antibody provided herein. The inclusion of tags fused to a polypeptide can facilitate polypeptide purification and/or detection. Typically, a tag or tag polypeptide refers to polypeptide that has enough residues to provide an epitope recognized by an antibody or can serve for detection or purification, yet is short enough such that it does not interfere with activity of the polypeptide to which it is linked. The tag polypeptide typically is sufficiently unique so an antibody that specifically binds thereto does not substantially cross-react with epitopes in the polypeptide to which it is linked. Suitable tag polypeptides generally have at least 5 or 6 amino acid residues and usually between about 8-50 amino acid residues, typically between 9-30 residues. The tags can be linked to one or more chimeric polypeptides in a multimer and permit detection of the multimer or its recovery from a sample or mixture. Such tags are well known and can be readily synthesized and designed. Exemplary tag polypeptides include those used for affinity purification and include, FLAG tags, His tags, the influenza hemagglutinin (HA) tag polypeptide and its antibody 12CA5, (Field et al. (1988) Mol. Cell. Biol. 8:2159-2165); the c-myc tag and the 8F9, 3C7, 6E10, G4, B7 and 9E10 antibodies thereto (see, e.g., Evan et al. (1985) Molecular and Cellular Biology 5 :3610-3616); and the Herpes Simplex virus glycoprotein D (gD) tag and its antibody (Paborsky et al. (1990) Protein Engineering 3:547-553 (1990). An antibody used to detect an epitope-tagged antibody is typically referred to herein as a secondary antibody.

[0333] As used herein, a label or detectable moiety is a detectable marker (e.g., a fluorescent molecule, chemiluminescent molecule, a bioluminescent molecule, a contrast agent (e.g., a metal), a radionuclide, a chromophore, a detectable peptide, or an enzyme that catalyzes the formation of a detectable product) that can be attached or linked directly or indirectly to a molecule (e.g., an antibody or antigen-binding fragment thereof, such as an anti-EGFR antibody or antigen-binding fragment thereof provided herein) or associated therewith and can be detected in vivo and/or in vitro. The detection method can be any method known in the art, including known in vivo and/or in vitro methods of detection (e.g., imaging by visual inspection, magnetic resonance (MR) spectroscopy, ultrasound signal, X-ray, gamma ray spectroscopy (e.g., positron emission tomography (PET) scanning, single-photon emission computed tomography (SPECT)), fluorescence spectroscopy or absorption). Indirect detection refers to measurement of a physical phenomenon, such as energy or particle emission or absorption, of an atom, molecule or composition that binds directly or indirectly to the detectable moiety (e.g., detection of a labeled secondary antibody or antigen-binding fragment thereof that binds to a primary antibody (e.g., an anti-EGFR antibody or antigen-binding fragment thereof provided herein).

[0334] As used herein, “nucleic acid” refers to at least two linked nucleotides or nucleotide derivatives, including a deoxyribonucleic acid (DNA) and a ribonucleic acid (RNA), joined together, typically by phosphodiester linkages. Also included in the term “nucleic acid” are analogs of nucleic acids such as peptide nucleic acid (PNA), phosphorothioate DNA, and other such analogs and derivatives or combinations thereof. Nucleic acids also include DNA and RNA derivatives containing, for example, a nucleotide analog or a “backbone” bond other than a phosphodiester bond, for example, a phosphotriester bond, a phosphoramidate bond, a phosphorothioate bond, a thioester bond, or a peptide bond (peptide nucleic acid). The term also includes, as equivalents, derivatives, variants and analogs of either RNA or DNA made from nucleotide analogs, single (sense or antisense) and double-stranded nucleic acids. Deoxyribonucleotides include deoxyadenosine, deoxycytidine, deoxyguanosine and deoxythymidine. For RNA, the uracil base is uridine.

[0335] As used herein, an isolated nucleic acid molecule is one which is separated from other nucleic acid molecules which are present in the natural source of the nucleic acid molecule. An “isolated” nucleic acid molecule, such as a cDNA molecule, can be substantially free of other cellular material, or culture medium when produced by recombinant techniques, or substantially free of chemical precursors or other chemicals when chemically synthesized. Exemplary isolated nucleic acid molecules provided herein include isolated nucleic acid molecules encoding an antibody or antigen-binding fragments provided.

[0336] As used herein, “operably linked” with reference to nucleic acid sequences, regions, elements or domains means that the nucleic acid regions are functionally related to each other. For example, nucleic acid encoding a leader peptide can be operably linked to nucleic acid encoding a polypeptide, whereby the nucleic acids can be transcribed and translated to express a functional fusion protein, wherein the leader peptide effects secretion of the fusion polypeptide. In some instances, the nucleic acid encoding a first polypeptide (e.g., a leader peptide) is operably linked to nucleic acid encoding a second polypeptide and the nucleic acids are transcribed as a single mRNA transcript, but translation of the mRNA transcript can result in one of two polypeptides being expressed. For example, an amber stop codon can be located between the nucleic acid encoding the first polypeptide and the nucleic acid encoding the second polypeptide, such that, when introduced into a partial amber suppressor cell, the resulting single mRNA transcript can be translated to produce either a fusion protein containing the first and second polypeptides, or can be translated to produce only the first polypeptide. In another example, a promoter can be operably linked to nucleic acid encoding a polypeptide, whereby the promoter regulates or mediates the transcription of the nucleic acid.

[0337] As used herein, “synthetic,” with reference to, for example, a synthetic nucleic acid molecule or a synthetic gene or a synthetic peptide refers to a nucleic acid molecule or polypeptide molecule that is produced by recombinant methods and/or by chemical synthesis methods.

[0338] As used herein, the residues of naturally occurring α-amino acids are the residues of those 20 α-amino acids found in nature which are incorporated into protein by the specific recognition of the charged tRNA molecule with its cognate mRNA codon in humans.

[0339] As used herein, “polypeptide” refers to two or more amino acids covalently joined. The terms “polypeptide” and “protein” are used interchangeably herein.

[0340] As used herein, a “peptide” refers to a polypeptide that is from 2 to about or 40 amino acids in length.

[0341] As used herein, an “amino acid” is an organic compound containing an amino group and a carboxylic acid group. A polypeptide contains two or more amino acids. For purposes herein, amino acids contained in the antibodies provided include the twenty naturally-occurring amino acids (Table 3), non-natural amino acids, and amino acid analogs (e.g., amino acids wherein the α-carbon has a side chain). As used herein, the amino acids, which occur in the various amino acid sequences of polypeptides appearing herein, are identified according to their well-known, three-letter or one-letter abbreviations (see Table 3). The nucleotides, which occur in the various nucleic acid molecules and fragments, are designated with the standard single-letter designations used routinely in the art.

[0342] As used herein, “amino acid residue” refers to an amino acid formed upon chemical digestion (hydrolysis) of a polypeptide at its peptide linkages. The amino acid residues described herein are generally in the “L” isomeric form. Residues in the “D” isomeric form can be substituted for any L-amino acid residue, as long as the desired functional property is retained by the polypeptide. NH₂ refers to the free amino group present at the amino terminus of a polypeptide. COOH refers to the free carboxy group present at the carboxyl terminus of a polypeptide. In keeping with standard polypeptide nomenclature described in J. Biol. Chem., 243:3557-59 (1968) and adopted at 37 C.F.R. §§1.821-1.822, abbreviations for amino acid residues are shown in Table 3:

TABLE 3
Table of Correspondence

| SYMBOL | | |
|---|---|---|
| 1-Letter | 3-Letter | AMINO ACID |
| Y | Tyr | Tyrosine |
| G | Gly | Glycine |
| F | Phe | Phenylalanine |
| M | Met | Methionine |
| A | Ala | Alanine |
| S | Ser | Serine |
| I | Ile | Isoleucine |
| L | Leu | Leucine |
| T | Thr | Threonine |
| V | Val | Valine |
| P | Pro | Proline |
| K | Lys | Lysine |
| H | His | Histidine |
| Q | Gln | Glutamine |
| E | Glu | Glutamic acid |
| Z | Glx | Glutamic Acid and/or Glutamine |
| W | Trp | Tryptophan |
| R | Arg | Arginine |
| D | Asp | Aspartic acid |
| N | Asn | Asparagine |
| B | Asx | Aspartic Acid and/or Asparagine |
| C | Cys | Cysteine |
| X | Xaa | Unknown or other |

[0343] All sequences of amino acid residues represented herein by a formula have a left to right orientation in the conventional direction of amino-terminus to carboxyl-terminus. In addition, the phrase “amino acid residue” is defined to include the amino acids listed in the Table of Correspondence (Table 3), modified, non-natural and unusual amino acids. Furthermore, a dash at the beginning or end of an amino acid residue sequence indicates a peptide bond to a further sequence of one or more amino acid residues or to an amino-terminal group such as NH₂ or to a carboxyl-terminal group such as COOH.

[0344] In a peptide or protein, suitable conservative substitutions of amino acids are known to those of skill in this art and generally can be made without altering a biological activity of a resulting molecule. Those of skill in this art recognize that, in general, single amino acid substitutions in non-essential regions of a polypeptide do not substantially alter biological activity (see, e.g., Watson et al., Molecular Biology of the Gene, 4th Edition, 1987, The Benjamin/Cummings Pub. co., p. 224).

[0345] Such substitutions can be made in accordance with the exemplary substitutions set forth in Table 4 as follows:

TABLE 4

| Original residue | Conservative substitution |
|---|---|
| Ala (A) | Gly; Ser |
| Arg (R) | Lys |
| Asn (N) | Gln; His |
| Cys (C) | Ser |
| Gln (Q) | Asn |
| Glu (E) | Asp |
| Gly (G) | Ala; Pro |
| His (H) | Asn; Gln |
| Ile (I) | Leu; Val |
| Leu (L) | Ile; Val |
| Lys (K) | Arg; Gln; Glu |
| Met (M) | Leu; Tyr; Ile |
| Phe (F) | Met; Leu; Tyr |
| Ser (S) | Thr |
| Thr (T) | Ser |
| Trp (W) | Tyr |
| Tyr (Y) | Trp; Phe |
| Val (V) | Ile; Leu |

[0346] Other substitutions also are permissible and can be determined empirically or in accord with other known conservative or non-conservative substitutions.

[0347] As used herein, “naturally occurring amino acids” refer to the 20 L-amino acids that occur in polypeptides.

[0348] As used herein, the term “non-natural amino acid” refers to an organic compound that has a structure similar to a natural amino acid but has been modified structurally to mimic the structure and reactivity of a natural amino acid. Non-naturally occurring amino acids thus include, for example, amino acids or analogs of amino acids other than the 20 naturally occurring amino acids and include, but are not limited to, the D-isostereomers of amino acids. Exemplary non-natural amino acids are known to those of skill in the art, and include, but are not limited to, 2-Aminoadipic acid (Aad), 3-Aminoadipic acid (Baad), β-alanine/β-Amino-propionic acid (Bala), 2-Aminobutyric acid (Abu), 4-Aminobutyric acid/piperidinic acid (4Abu), 6-Aminocaproic acid (Acp), 2-Aminoheptanoic acid (Ahe), 2-Aminoisobutyric acid (Aib), 3-Aminoisobutyric acid (Baib), 2-Aminopimelic acid (Apm), 2,4-Diaminobutyric acid (Dbu), Desmosine (Des), 2,2′-Diaminopimelic acid (Dpm), 2,3-Diaminopropionic acid (Dpr), N-Ethylglycine (EtGly), N-Ethylasparagine (EtAsn), Hydroxylysine (Hyl), allo-Hydroxylysine (Ahyl), 3-Hydroxyproline (3Hyp), 4-Hydroxyproline (4Hyp), Isodesmosine (Ide), allo-Isoleucine (Aile), N-Methylglycine, sarcosine (MeGly), N-Methylisoleucine (MeIle), 6-N-Methyllysine (MeLys), N-Methylvaline (MeVal), Norvaline (Nva), Norleucine (Nle), and Ornithine (Orn).

[0349] As used herein, a DNA construct is a single or double stranded, linear or circular DNA molecule that contains segments of DNA combined and juxtaposed in a manner not found in nature. DNA constructs exist as a result of human manipulation, and include clones and other copies of manipulated molecules.

[0350] As used herein, a DNA segment is a portion of a larger DNA molecule having specified attributes. For example, a DNA segment encoding a specified polypeptide is a portion of a longer DNA molecule, such as a plasmid or plasmid fragment, which, when read from the 5′ to 3′ direction, encodes the sequence of amino acids of the specified polypeptide.

[0351] As used herein, the term polynucleotide means a single- or double-stranded polymer of deoxyribonucleotides or ribonucleotide bases read from the 5′ to the 3′ end. Polynucleotides include RNA and DNA, and can be isolated from natural sources, synthesized in vitro, or prepared from a combination of natural and synthetic molecules. The length of a polynucleotide molecule is given herein in terms of nucleotides (abbreviated “nt”) or base pairs (abbreviated “bp”). The term nucleotides is used for single- and double-stranded molecules where the context permits. When the term is applied to double-stranded molecules it is used to denote overall length and will be understood to be equivalent to the term base pairs. It will be recognized by those skilled in the art that the two strands of a double-stranded polynucleotide can differ slightly in length and that the ends thereof can be staggered; thus all nucleotides within a double-stranded polynucleotide molecule cannot be paired. Such unpaired ends will, in general, not exceed 20 nucleotides in length.

[0352] As used herein, production by recombinant means by using recombinant DNA methods means the use of the well known methods of molecular biology for expressing proteins encoded by cloned DNA.

[0353] As used herein, “expression” refers to the process by which polypeptides are produced by transcription and translation of polynucleotides. The level of expression of a polypeptide can be assessed using any method known in art, including, for example, methods of determining the amount of the polypeptide produced from the host cell. Such methods can include, but are not limited to, quantitation of the polypeptide in the cell lysate by ELISA, Coomassie blue staining following gel electrophoresis, Lowry protein assay and Bradford protein assay.

[0354] As used herein, a “host cell” is a cell that is used in to receive, maintain, reproduce and amplify a vector. A host cell also can be used to express the polypeptide encoded by the vector. The nucleic acid contained in the vector is replicated when the host cell divides, thereby amplifying the nucleic acids.

[0355] As used herein, a “vector” is a replicable nucleic acid from which one or more heterologous proteins, can be expressed when the vector is transformed into an appropriate host cell. Reference to a vector includes those vectors into which a nucleic acid encoding a polypeptide or fragment thereof can be introduced, typically by restriction digest and ligation. Reference to a vector also includes those vectors that contain nucleic acid encoding a polypeptide, such as a modified anti-EGFR antibody. The vector is used to introduce the nucleic acid encoding the polypeptide into the host cell for amplification of the nucleic acid or for expression/display of the polypeptide encoded by the nucleic acid. The vectors typically remain episomal, but can be designed to effect integration of a gene or portion thereof into a chromosome of the genome. Also contemplated are vectors that are artificial chromosomes, such as yeast artificial chromosomes and mammalian artificial chromosomes. Selection and use of such vehicles are well known to those of skill in the art. A vector also includes “virus vectors” or “viral vectors.” Viral vectors are engineered viruses that are operatively linked to exogenous genes to transfer (as vehicles or shuttles) the exogenous genes into cells.

[0356] As used herein, an “expression vector” includes vectors capable of expressing DNA that is operatively linked with regulatory sequences, such as promoter regions, that are capable of effecting expression of such DNA fragments. Such additional segments can include promoter and terminator sequences, and optionally can include one or more origins of replication, one or more selectable markers, an enhancer, a polyadenylation signal, and the like. Expression vectors are generally derived from plasmid or viral DNA, or can contain elements of both. Thus, an expression vector refers to a recombinant DNA or RNA construct, such as a plasmid, a phage, recombinant virus or other vector that, upon introduction into an appropriate host cell, results in expression of the cloned DNA. Appropriate expression vectors are well known to those of skill in the art and include those that are replicable in eukaryotic cells and/or prokaryotic cells and those that remain episomal or those which integrate into the host cell genome.

[0357] As used herein, “primary sequence” refers to the sequence of amino acid residues in a polypeptide or the sequence of nucleotides in a nucleic acid molecule.

[0358] As used herein, “sequence identity” refers to the number of identical or similar amino acids or nucleotide bases in a comparison between a test and a reference poly-peptide or polynucleotide. Sequence identity can be determined by sequence alignment of nucleic acid or protein sequences to identify regions of similarity or identity. For purposes herein, sequence identity is generally determined by alignment to identify identical residues. The alignment can be local or global. Matches, mismatches and gaps can be identified between compared sequences. Gaps are null amino acids or nucleotides inserted between the residues of aligned sequences so that identical or similar characters are aligned. Generally, there can be internal and terminal gaps. When using gap penalties, sequence identity can be determined with no penalty for end gaps (e.g. terminal gaps are not penalized). Alternatively, sequence identity can be determined without taking into account gaps as the number of identical positions/length of the total aligned sequence×100.

[0359] As used herein, a “global alignment” is an alignment that aligns two sequences from beginning to end, aligning each letter in each sequence only once. An alignment is produced, regardless of whether or not there is similarity or identity between the sequences. For example, 50% sequence identity based on “global alignment” means that in an alignment of the full sequence of two compared sequences each of 100 nucleotides in length, 50% of the residues are the same. It is understood that global alignment also can be used in determining sequence identity even when the length of the aligned sequences is not the same. The differences in the terminal ends of the sequences will be taken into account in determining sequence identity, unless the “no penalty for end gaps” is selected. Generally, a global alignment is used on sequences that share significant similarity over most of their length. Exemplary algorithms for performing global alignment include the Needleman-Wunsch algorithm (Needleman et al. J. Mol. Biol. 48: 443 (1970). Exemplary programs for performing global alignment are publicly available and include the Global Sequence Alignment Tool available at the National Center for Biotechnology Information (NCBI) website (ncbi.nlm.nih.gov/), and the program available at deepc2.psi.iastate.edu/aat/align/align.html.

[0360] As used herein, a “local alignment” is an alignment that aligns two sequence, but only aligns those portions of the sequences that share similarity or identity. Hence, a local alignment determines if sub-segments of one sequence are present in another sequence. If there is no similarity, no alignment will be returned. Local alignment algorithms include BLAST or Smith-Waterman algorithm (Adv. Appl. Math. 2: 482 (1981)). For example, 50% sequence identity based on “local alignment” means that in an alignment of the full sequence of two compared sequences of any length, a region of similarity or identity of 100 nucleotides in length has 50% of the residues that are the same in the region of similarity or identity.

[0361] For purposes herein, sequence identity can be determined by standard alignment algorithm programs used with default gap penalties established by each supplier. Default parameters for the GAP program can include: (1) a unary comparison matrix (containing a value of 1 for identities and 0 for non identities) and the weighted comparison matrix of Gribskov et al. Nucl. Acids Res. 14: 6745 (1986), as described by Schwartz and Dayhoff, eds., Atlas of Protein Sequence and Structure, National Biomedical Research Foundation, pp. 353-358 (1979); (2) a penalty of 3.0 for each gap and an additional 0.10 penalty for each symbol in each gap; and (3) no penalty for end gaps. Whether any two nucleic acid molecules have nucleotide sequences or any two polypeptides have amino acid sequences that are at least 80%, 85%, 90%, 95%, 96%, 97%, 98% or 99% “identical,” or other similar variations reciting a percent identity, can be determined using known computer algorithms based on local or global alignment (see e.g., wikipedia.org/wiki/Sequence_alignment_software, providing links to dozens of known and publicly available alignment databases and programs). Generally, for purposes herein sequence identity is determined using computer algorithms based on global alignment, such as the Needleman-Wunsch Global Sequence Alignment tool available from NCBI/BLAST (blast.ncbi.nlm.nih.gov/Blast.cgi?CMD=Web&Page_TYPE=BlastHome); LAlign (William Pearson implementing the Huang and Miller algorithm (Adv. Appl. Math. (1991) 12:337-357)); and program from Xiaoqui Huang available at deepc2.psi.iastate.edu/aat/align/align.html. Typically, the full-length sequence of each of the compared polypeptides or nucleotides is aligned across the full-length of each sequence in a global alignment. Local alignment also can be used when the sequences being compared are substantially the same length.

[0362] Therefore, as used herein, the term “identity” represents a comparison or alignment between a test and a reference polypeptide or polynucleotide. In one non-limiting example, “at least 90% identical to” refers to percent identities from 90 to 100% relative to the reference polypeptide or polynucleotide. Identity at a level of 90% or more is indicative of the fact that, assuming for exemplification purposes a test and reference polypeptide or polynucleotide length of 100 amino acids or nucleotides are compared, no more than 10% (i.e., 10 out of 100) of amino acids or nucleotides in the test polypeptide or polynucleotide differs from that of the reference polypeptides. Similar comparisons can be made between a test and reference polynucleotides. Such differences can be represented as point mutations randomly distributed over the entire length of an amino acid sequence or they can be clustered in one or more locations of varying length up to the maximum allowable, e.g., 10/100 amino acid difference (approximately 90% identity). Differences also can be due to deletions or truncations of amino acid residues. Differences are defined as nucleic acid or amino acid substitutions, insertions or deletions. Depending on the length of the compared sequences, at the level of homologies or identities above about 85-90%, the result can be independent of the program and gap parameters set; such high levels of identity can be assessed readily, often without relying on software.

[0363] As used herein, a disulfide bond (also called an S—S bond or a disulfide bridge) is a single covalent bond derived from the coupling of thiol groups. Disulfide bonds in proteins are formed between the thiol groups of cysteine residues, and stabilize interactions between polypeptide domains, such as antibody domains.

[0364] As used herein, “coupled” or “conjugated” means attached via a covalent or noncovalent interaction.

[0365] As used herein, the phrase “conjugated to an antibody” or “linked to an antibody” or grammatical variations thereof, when referring to the attachment of a moiety to an antibody or antigen-binding fragment thereof, such as a diagnostic or therapeutic moiety, means that the moiety is attached to the antibody or antigen-binding fragment thereof by any known means for linking peptides, such as, for example, by production of fusion protein by recombinant means or post-translationally by chemical means. Conjugation can employ any of a variety of linking agents to effect conjugation, including, but not limited to, peptide or compound linkers or chemical cross-linking agents.

[0366] As used herein, “Maytansinoid drug moiety” means the substructure of an antibody-drug conjugate that has the structure of a maytansine compound. Maytansine was first isolated from the east African shrub Maytenus serrata (U.S. Pat. No. 3,896,111). Subsequently, it was discovered that certain microbes also produce maytansinoids, such as maytansinol and C-3 maytansinol esters (U.S. Pat. No. 4,151,042). Synthetic maytansinol and maytansinol analogues have been reported. See U.S. Pat. Nos. 4,137,230; 4,248,870; 4,256,746; 4,260,608; 4,265,814; 4,294,757; 4,307,016; 4,308,268; 4,308,269; 4,309,428; 4,313,946; 4,315,929; 4,317,821; 4,322,348; 4,331,598; 4,361,650; 4,364,866; 4,424,219; 4,450,254; 4,362,663; and 4,371,533, and Kawai et al (1984) Chem. Pharm. Bull. 3441-3451).

[0367] A “free cysteine amino acid” refers to a cysteine amino acid residue that has a thiol functional group (—SH), and is not paired as an intramolecular or intermolecular disulfide bridge. It can be engineered into a parent antibody.

[0368] As used herein, “Linker”, “Linker Unit”, or “link” means a peptide or chemical moiety containing a chain of atoms that covalently attaches an antibody to a drug moiety or therapeutic moiety.

[0369] As used herein, “Antibody-dependent cell-mediated cytotoxicity” and “ADCC” refer to a cell-mediated reaction in which nonspecific cytotoxic cells that express Fc receptors (FcRs) (e.g., Natural Killer (NK) cells, neutrophils, and macrophages) recognize bound antibody on a target cell and subsequently cause lysis of the target cell. The primary cells for mediating ADCC, NK cells, express FcγRIII only, whereas monocytes express FcγRI, FcγRII and FcγRIII. FcR expression on hematopoietic cells in summarized is Table 3 on page 464 of Ravetch and Kinet, (1991) Annu. Rev. Immunol, 9:457-92. To assess ADCC activity of a molecule of interest, an in vitro ADCC assay may be performed (U.S. Pat. No. 55,003,621; U.S. Pat. No. 5,821,337). Useful effector cells for such assays include peripheral blood mononuclear cells (PBMC) and Natural Killer (NK) cells. Alternatively, or additionally, ADCC activity of the molecule of interest may be assessed in vivo, e.g., in a animal model such as that disclosed in Clynes et al (1998) PNAS (USA), 95:652-656.

[0370] As used herein “therapeutic activity” refers to the in vivo activity of a therapeutic polypeptide. Generally, the therapeutic activity is the activity that is associated with treatment of a disease or condition. For example, the therapeutic activity of an anti-EGFR antibody includes inhibitory activities on EGFR phosphorylation, signaling and cell growth, and in particular inhibitory activities on tumor cell growth. Therapeutic activity of a modified polypeptide can be any level of percentage of therapeutic activity of the unmodified polypeptide, including but not limited to, 1% of the activity, 2%, 3%, 4%, 5%, 10%, 20%, 30%, 40%, 50%, 60%, 70%, 80%, 90%, 91%, 92%, 93%, 94%, 95%, 96%, 97%, 98%, 99%, 100%, 200%, 300%, 400%, 500%, or more of therapeutic activity compared to the unmodified polypeptide.

[0371] As used herein, the term “assessing” is intended to include quantitative and qualitative determination in the sense of obtaining an absolute value for the activity of a protein, such as a modified anti-EGFR antibody, or an antigen binding fragment thereof, present in the sample, and also of obtaining an index, ratio, percentage, visual, or other value indicative of the level of the activity. Assessment can be direct or indirect.

[0372] As used herein, “disease or disorder” refers to a pathological condition in an organism resulting from cause or condition including, but not limited to, infections, acquired conditions, genetic conditions, and characterized by identifiable symptoms.

[0373] As used herein, “EGFR-associated disease or condition” or “conditions responsive to treatment with an anti-EGFR antibody,” refers to any disease or condition that is associated with or caused by aberrant EGFR signaling or overexpression of EGFR. Such diseases and conditions are known in the art, and exemplary of such are described herein. For example, EGFR-associated disease or conditions or conditions responsive to treatment with an anti-EGFR antibody include cancers, such as but not limited to, colorectal cancer, squamous cell cancer of the head and neck and non-small-cell lung cancer.

[0374] As used herein, “treating” a subject with a disease or condition means that the subject's symptoms are partially or totally alleviated, or remain static following treatment. Hence treatment encompasses prophylaxis, therapy and/or cure. Prophylaxis refers to prevention of a potential disease and/or a prevention of worsening of symptoms or progression of a disease. Treatment also encompasses any pharmaceutical use of any antibody or antigen-binding fragment thereof provided or compositions provided herein.

[0375] As used herein, “prevention” or prophylaxis, and grammatically equivalent forms thereof, refers to methods in which the risk of developing disease or condition is reduced.

[0376] As used herein, a “pharmaceutically effective agent” includes any therapeutic agent or bioactive agents, including, but not limited to, for example, anesthetics, vasoconstrictors, dispersing agents, conventional therapeutic drugs, including small molecule drugs and therapeutic proteins.

[0377] As used herein, a “therapeutic effect” means an effect resulting from treatment of a subject that alters, typically improves or ameliorates the symptoms of a disease or condition or that cures a disease or condition.

[0378] As used herein, a “therapeutically effective amount” or a “therapeutically effective dose” refers to the quantity of an agent, compound, material, or composition containing a compound that is at least sufficient to produce a therapeutic effect following administration to a subject. Hence, it is the quantity necessary for preventing, curing, ameliorating, arresting or partially arresting a symptom of a disease or disorder.

[0379] As used herein, “therapeutic efficacy” refers to the ability of an agent, compound, material, or composition containing a compound to produce a therapeutic effect in a subject to whom the agent, compound, material, or composition containing a compound has been administered.

[0380] As used herein, a “prophylactically effective amount” or a “prophylactically effective dose” refers to the quantity of an agent, compound, material, or composition containing a compound that when administered to a subject, will have the intended prophylactic effect, e.g., preventing or delaying the onset, or reoccurrence, of disease or symptoms, reducing the likelihood of the onset, or reoccurrence, of disease or symptoms, or reducing the incidence of viral infection. The full prophylactic effect does not necessarily occur by administration of one dose, and can occur only after administration of a series of doses. Thus, a prophylactically effective amount can be administered in one or more administrations.

[0381] As used herein, amelioration of the symptoms of a particular disease or disorder by a treatment, such as by administration of a pharmaceutical composition or other therapeutic, refers to any lessening, whether permanent or temporary, lasting or transient, of the symptoms that can be attributed to or associated with administration of the composition or therapeutic.

[0382] As used herein, “Prodrug” is a precursor or derivative form of a pharmaceutically active substance that is less cytotoxic to tumor cells compared to the parent drug and is capable of being enzymatically activated or converted into the more active parent form (see, e.g., Wilman, 1986, Biochemical Society Transactions, 615th Meeting Belfast, 14:375-382; and Stella et al., “Prodrugs: A Chemical Approach to Targeted Drug Delivery,” Directed Drug Delivery, Borchardt et al., (ed.): 247-267, Humana Press, 1985.)

[0383] As used herein, an “anti-cancer agent” refers to any agent that is destructive or toxic to malignant cells and tissues. For example, anti-cancer agents include agents that kill cancer cells or otherwise inhibit or impair the growth of tumors or cancer cells. Exemplary anti-cancer agents are chemotherapeutic agents.

[0384] As used herein, an “anti-angiogenic agent” or “angiogenesis inhibitor” is a compound that blocks, or interferes with, the development of blood vessels.

[0385] As used herein, a “hyperproliferative disease” is a condition caused by excessive growth of non-cancer cells that express a member of the EGFR family of receptors.

[0386] As used herein, the term “subject” refers to an animal, including a mammal, such as a human being.

[0387] As used herein, a patient refers to a human subject.

[0388] As used herein, animal includes any animal, such as, but are not limited to primates including humans, gorillas and monkeys; rodents, such as mice and rats; fowl, such as chickens; ruminants, such as goats, cows, deer, sheep; pigs and other animals. Non-human animals exclude humans as the contemplated animal. The polypeptides provided herein are from any source, animal, plant, prokaryotic and fungal. Most polypeptides are of animal origin, including mammalian origin.

[0389] As used herein, a “composition” refers to any mixture. It can be a solution, suspension, liquid, powder, paste, aqueous, non-aqueous or any combination thereof.

[0390] As used herein, a “combination” refers to any association between or among two or more items. The combination can be two or more separate items, such as two compositions or two collections, can be a mixture thereof, such as a single mixture of the two or more items, or any variation thereof. The elements of a combination are generally functionally associated or related.

[0391] As used herein, combination therapy refers to administration of two or more different therapeutics, such as an anti-EGFR antibody (or antigen binding fragment thereof) and one or more therapeutics. The different therapeutic agents can be provided and administered separately, sequentially, intermittently, or can be provided in a single composition.

[0392] As used herein, a kit is a packaged combination that optionally includes other elements, such as additional reagents and instructions for use of the combination or elements thereof, for a purpose including, but not limited to, activation, administration, diagnosis, and assessment of a biological activity or property.

[0393] As used herein, a “unit dose form” refers to physically discrete units suitable for human and animal subjects and packaged individually as is known in the art.

[0394] As used herein, a “single dosage formulation” refers to a formulation for direct administration.

[0395] As used herein, a multi-dose formulation refers to a formulation that contains multiple doses of a therapeutic agent and that can be directly administered to provide several single doses of the therapeutic agent. The doses can be administered over the course of minutes, hours, weeks, days or months. Multidose formulations can allow dose adjustment, dose-pooling and/or dose-splitting. Because multi-dose formulations are used over time, they generally contain one or more preservatives to prevent microbial growth.

[0396] As used herein, an “article of manufacture” is a product that is made and sold. As used throughout this application, the term is intended to encompass any of the compositions provided herein contained in articles of packaging.

[0397] As used herein, a “fluid” refers to any composition that can flow. Fluids thus encompass compositions that are in the form of semi-solids, pastes, solutions, aqueous mixtures, gels, lotions, creams and other such compositions.

[0398] As used herein, an isolated or purified polypeptide or protein (e.g. an isolated antibody or antigen-binding fragment thereof) or biologically-active portion thereof (e.g. an isolated antigen-binding fragment) is substantially free of cellular material or other contaminating proteins from the cell or tissue from which the protein is derived, or substantially free from chemical precursors or other chemicals when chemically synthesized. Preparations can be determined to be substantially free if they appear free of readily detectable impurities as determined by standard methods of analysis, such as thin layer chromatography (TLC), gel electrophoresis and high performance liquid chromatography (HPLC), used by those of skill in the art to assess such purity, or sufficiently pure such that further purification does not detectably alter the physical and chemical properties, such as enzymatic and biological activities, of the substance. Methods for purification of the compounds to produce substantially chemically pure compounds are known to those of skill in the art. A substantially chemically pure compound, however, can be a mixture of stereoisomers. In such instances, further purification might increase the specific activity of the compound. As used herein, a “cellular extract” or “lysate” refers to a preparation or fraction which is made from a lysed or disrupted cell.

[0399] As used herein, a “control” refers to a sample that is substantially identical to the test sample, except that it is not treated with a test parameter, or, if it is a plasma sample, it can be from a normal volunteer not affected with the condition of interest. A control also can be an internal control.

[0400] As used herein, the singular forms “a,” “an” and “the” include plural referents unless the context clearly dictates otherwise. Thus, for example, reference to a polypeptide, comprising “an immunoglobulin domain” includes polypeptides with one or a plurality of immunoglobulin domains.

[0401] As used herein, the term “or” is used to mean “and/or” unless explicitly indicated to refer to alternatives only or the alternatives are mutually exclusive.

[0402] As used herein, ranges and amounts can be expressed as “about” a particular value or range. About also includes the exact amount. Hence “about 5 amino acids” means “about 5 amino acids” and also “5 amino acids.”

[0403] As used herein, “optional” or “optionally” means that the subsequently described event or circumstance does or does not occur and that the description includes instances where said event or circumstance occurs and instances where it does not. For example, an optionally variant portion means that the portion is variant or non-variant.

[0404] As used herein, the abbreviations for any protective groups, amino acids and other compounds, are, unless indicated otherwise, in accord with their common usage, recognized abbreviations, or the IUPAC-IUB Commission on Biochemical Nomenclature (see, Biochem. (1972) 11(9):1726-1732).

[0405] For clarity of disclosure, and not by way of limitation, the detailed description is divided into the subsections that follow.

### B. EGFR AND ANTI-EGFR ANTIBODIES

[0406] Anti-EGFR antibodies are known and approved for various indications, including metastatic colorectal cancer (MCRC), squamous cell carcinoma of the head and neck (SCCHN) and non-small cell lung cancer (NSCLC). Anti-EGFR antibodies include, but are not limited to, Erbitux® (cetuximab, C225 or IMC-C225), 11F8 by Zhu (WO 2005/090407), EMD 72000 (matuzumab), Vectibix™ (panitumumab; ABX-EGF), TheraCIM (nimotuzumab), and Hu-Max-EGFR (zalutumumab). When administered to subjects, however, these therapeutic antibodies result in adverse side effects to the subjects (Eng C. (2009) Nat. Rev. Clin. Oncol., 6:207-218). This has limited their use. For example, anti-EGFR antibodies are associated with significant and characteristic adverse events including skin toxicities and digestive disturbances (including nausea, vomiting, diarrhea), that often lead to interruption of dosing and discontinuation of treatment. For example, EGFR, is highly expressed in pre-keratinocytes and basal cells of the skin. Blockade of EGFR signaling in the skin precursors by anti-EGFR antibodies leads to skin precursor growth inhibition, apoptosis and inflammation. This can result in skin toxicity, such a rash and other skin lesions.

[0407] It is found herein that side effects can be reduced by providing antibodies that exhibit increased activity at targeted disease tissue, such as the tumor, but decreased activity at non-disease tissues or organs, in particular tissue sites (e.g. basal layer of skin or dermis) associated with adverse events. As a therapeutic, the activity of anti-EGFR antibodies is principally targeted to the tumor environment, which exhibits an acidic pH and elevated lactate levels, e.g., between 10-15 mM lactate.

[0408] In contrast, the dermis, which is where many side effects are localized, exhibits a neutral pH and normal lactate levels. The differences in conditions that characterize solid tumors, such as low pH and hypoxia, can be leveraged to provide antibodies that are more active in the diseased microenvironment of the tumor. Hence, provided herein are modified anti-EGFR antibodies that are conditionally active in the tumor microenvironment and exhibit altered activity or increased activity under conditions present in the tumor microenvironment compared to normal tissues. For example, the antibodies provided herein are more active at low pH and/or high lactate, than at neutral pH or low lactate. As a consequence of this altered activity, subjects treated with the antibodies have fewer and/or reduced side effects.

[0409] In particular, provided herein are anti-EGFR antibodies that exhibit reduced activity, for example binding activity, at neutral pH compared to activity at lower pH, for example, pH 5.8 to 6.8, such as the acidic pH environment of the tumor. In another example, the modified anti-EGFR antibodies exhibit increased activity, for example binding activity, at increased lactate concentrations, such as at concentrations between 10 and 15 mM lactate. In yet other examples, the anti-EGFR antibodies provided herein bind with increased activity, such as binding activity, at both reduced pH and elevated lactate levels. The anti-EGFR antibodies provided herein exhibit altered activity such that they confer reduced or fewer side effects when administered.

[0410] 1. EGFR

[0411] Epidermal growth factor receptor (Uniprot Accession No. P00533; SEQ ID NO:6) is a 170 kDA Type I glycoprotein. EGFR is a member of the ErbB family of receptor tyrosine kinases, which includes HER2/c-neu (ErbB-2), Her3 (ErbB-3) and Her4 (ErbB-4). EGFR exists on cell surfaces and contains three domains, including an extracellular ligand-binding domain, an intracellular tyrosine kinase domain and a transmembrane lipophilic segment. In addition to their presence on a tumor cells, epidermal growth factor receptors are ubiquitous, distributed randomly on the surface of normal cells, excluding hematopoietic cells and cells of epidermal origin.

[0412] Epidermal growth factor receptor (EGFR; also known as receptor tyrosine-protein kinase erbB-1, ErbB-1, HER1) is a tyrosine kinase growth factor receptor involved in signaling cascades important for cell growth, proliferation, survival and motility. EGFR activity is stimulated or activated by binding of endogenous ligands such as epidermal growth factor (EGF), as well as other endogenous EGF-like ligands including TGF-α, amphiregulin, heparin-binding EGF (HB-EGF) and betacellulin. Upon ligand binding, the ligand-EGFR complex undergoes dimerization and internalization into the cell. EGFR can homodimerize with other monomeric EGFR molecules, or alternatively, heterodimerize with another HER receptor, such as HER2, ErbB-3 or ErbB-4. EGFR dimerization turns on intrinsic intracellular protein-tyrosine kinase activity. Thus, dimerization activates the intracellular protein kinase via autophosphorylation of tyrosine residues in the cytoplasmic tail. These phosphotyrosine residues act as docking sites for downstream effectors such as adaptor molecules and enzymes leading to initiation of a variety of signal transduction pathways, including mitogen-activated protein kinase (MAPK), Akt/phosphatidylinositol-3-OH kinase (PI3K) and c-Jun N-terminal kinases (JNK), thereby regulating a variety of mitogenic mechanisms involved in DNA synthesis, cell proliferation, cell migration, cell survival and cell adhesion.

[0413] Aberrant signal transduction through activated growth factor receptors is a common in many solid tumors (Yarden and Sliwkowski (2001) Nat Rev Mol Cell Biol 2:127-137). EGFRs have been observed in a variety of solid human tumors, including glioma and colon, head and neck, pancreatic, non-small cell lung, breast, renal, ovarian, and bladder carcinomas (Herbst and Hong (2002) Seminars in Oncology 29(5) Suppl. 14: 18-30). As such, EGFR is an attractive target for anti-cancer therapeutics. EGFR is important in regulating cell survival and apoptosis, angiogenesis, cell motility and metastasis (Herbst et al. (2001) Expert Opin. Biol. Ther. 1(4):719-732). Aberrant EGFR signaling and EGFR overexpession have been observed in various cancers and correlated with poor prognosis and elevated risk of invasive or metastatic disease (Herbst et al. (2001) Expert Opin. Biol. Ther. 1(4):719-732). EGFR activation is associated with significant upregulation of secretion of vascular endothelial growth factor, a stimulator of tumor angiogenesis (Petit at al. (1997) Am J Pathol 151:1523-1530).

[0414] 2. Anti-EGFR Antibodies and Side Effects

[0415] Therapeutic agents that target and inhibit aberrant EGFR signaling include anti-EGFR antibodies. Anti-EGFR antibodies act by binding to epidermal growth factor receptor (EGFR). The anti-EGFR antibodies act by competing for and inhibiting the binding of ligands, such as EGF, to the extracellular ligand binding domain of EGF. The result of this is that cytoplasmic domain phosphorylation and the resulting signal transduction events are inhibited. Hence, anti-EGFR antibodies can be effective therapeutics by blocking EGFR-mediated cell signaling and cell growth.

[0416] Anti-EGFR antibodies, however, cannot distinguish between cancer cells and normal cells, and thus adverse side effects are common. For example, EGFR is widely distributed throughout epithelial tissues, resulting in skin toxicity shared by many EGFR inhibitors (Herbst and Hong (2002) Seminars in Oncology 29(5) Suppl. 14: 18-30). In human skin, EGFR is expressed in basal keratinocytes and can stimulate epidermal growth, inhibit differentiation, and accelerate wound healing (Lacouture and Melosky (2007) Skin Therapy Lett. 12, 1-5; Nanney et al. (1990) J. Invest. Dermatol 94(6):742-748; Lacouture, M. E. (2006) Nat Rev Cancer 6:803-812). Inhibition of EGFR function can impair growth and migration of keratinocytes, and result in inflammatory chemokine expression, resulting in rashes (Lacouture, M. E. (2006) Nat Rev Cancer 6:803-812). Increased apoptosis of keratinocytes upon treatment with EGFR inhibitors is correlated with onset of rash in subjects treated with the EGFR inhibitors (Lacouture, M. E. (2006) Nat Rev Cancer 6:803-812). Keratinocytes are located in the stratum basale, the deepest layer of the skin, which has a pH between 7.0 and 7.2. The blood vessels in the dermis provide nourishment and waste removal for the epidermis, thus making the epidermis, in particular the stratum basale, most susceptible to systemically circulated anti-EGFR therapies.

[0417] The most common side effects associated with anti-EGFR antibodies, such as cetuximab, are dermatologic reactions, which are seen in 45-100% of patients (Le and Perez-Soler (2009) Target Oncol 4:107-119). Common dermatologic reactions include, acneiform rash, papulopustular rash, hair growth abnormalities, dry and itchy skin and periungula inflammation with tenderness (Eng (2009) Nat Rev Clin Oncol 6:207-218; Monti et al. (2007) Int J Biol Markers 22:S53-S61; Saif and Kim (2007) Expert Opin Drug Saf 6:175-182). Additional dermatologic reactions include telangiectasia, hyperpigmentation, pruritus without rash, erythema and oral aphthae (Eng (2009) Nat Rev Clin Oncol 6:207-218). Cetuximab elicits an immune response in about 5-15% of patients, with some patients reporting severe anaphylactic reactions (Chung et al. (2008) N Engl J Med 358:1109-1117). These hypersensitivity reactions have been linked to galactose-alpha-1,3-galactose oligosaccharides on cetuximab that induce the production of IgG antibodies (Chung et al. (2008) N Engl J Med 358:1109-1117). Further side effects include pulmonary toxicities, including dyspnea, cough, wheezing, pneumonia, hypoxemia, respiratory insufficiency/failure, pulmonary embolus, pleural effusion and non-specific respiratory disorders (Hoag et al. (2009) J Experimental & Clinical Cancer Research 28:113). Other side effects include fever, chills, asthenia/malaise, mucosal surface problems, nausea, gastrointestinal problems, abdominal pain, headache and hypomagnesemia (Eng (2009) Nat Rev Clin Oncol 6:207-218; Fakih and Vincent, (2010) Curr. Oncol. 17(S1):S18-S30; Int. Pat. No. WO2011059762).

[0418] The conditionally active anti-EGFR antibodies provided herein exhibit selectivity for tumor cells compared to non-tumor cell targets, such as basal keratinocytes and other basal cell. Hence, the conditionally active anti-EGFR antibodies can result in reduced side effects when administered to patients compared to currently available anti-EGFR antibodies, including eliminating, minimizing or reducing systemic side effects, including dermal toxicities, while retaining their ability to block EGFR signaling. They also permit dosings to achieve increased efficacy compared to existing therapeutics.

[0419] 3. Cetuximab

[0420] Included among the conditionally active anti-EGFR antibodies provided herein are modified anti-EGFR antibodies that are modified compared to the anti-EGFR antibody Cetuximab, antigen-binding fragments thereof or variants thereof (e.g. a humanized form of cetuximab, e.g. Hu225). Cetuximab (also known as C225 or IMC-C225) is a mouse/human chimeric, IgG1 monoclonal antibody that binds to human epidermal growth factor receptor. Cetuximab was derived from M225, which was identified using EGFR from human A431 epidermoid carcinoma cells as an immunogen (Gill et al. (1984) J Biol Chem 259:7755-7760; Sato et al., (1983) Mol Biol Med 1:511-529; Masui et al., (1984) Cancer Res 44:1002-1007; Kawamoto et al. (1983) Proc Natl Acad Sci USA 80:1337-1341). M225 inhibits binding of the epidermal growth factor to the EGF receptor and is an antagonist of in vivo EGF-stimulated tyrosine kinase activity. (Gill et al. (1984) J Biol Chem 259:7755-7760).

[0421] a. Structure

[0422] Cetuximab is a full-length mouse/human chimeric IgG1 antibody. A full-length antibody contains four polypeptide chains, two identical heavy (H) chains (each usually containing about 440 amino acids) and two identical light (L) chains (each containing about 220 amino acids). The light chains exist in two distinct forms called kappa (κ) and lambda (λ). Each chain is organized into a series of domains organized as immunoglobulin (Ig) domains. An Ig domain is characterized by a structure called the Ig fold, which contains two beta-pleated sheets, each containing anti-parallel beta strands connected by loops. The two beta sheets in the Ig fold are sandwiched together by hydrophobic interactions and a conserved intra-chain disulfide bond. The plurality of Ig domains in the antibody chains are organized into a variable (V) and constant (C) region domains. The variable domains confer antigen-specificity to the antibody through three portions called complementarity determining regions (CDRs) or hypervariable (HV) regions. The CDR regions are precisely defined and universally numbered in antibodies (see e.g., Kabat, E. A. et al. (1991) Sequences of Proteins of Immunological Interest, Fifth Edition, U.S. Department of Health and Human Services, NIH Publication No. 91-3242, and Chothia, C. et al. (1987) J. Mol. Biol. 196:901-917; AbM (Martin et al. (1989) Proc Natl Acad Sci USA 86:9268-9272; Martin et al. (1991) Methods Enzymol 203:121-153; Pederson et al. (1992) Immunomethods 1:126). Together, the three heavy chain CDRs and the three light chain CDRs make up an antigen-binding site (antibody combining site) of the antibody, which physically interacts with cognate antigen and provides the specificity of the antibody. The constant region promotes activation of complement and effector cells. Like CDR regions, constant regions are precisely defined and universally numbered in antibodies using EU index and Kabat numbering schemes (see e.g., Kabat, E. A. et al. (1991) Sequences of Proteins of Immunological Interest, Fifth Edition, U.S. Department of Health and Human Services, NIH Publication No. 91-3242). Light chains have two domains, corresponding to the C region (CO and the V region (V_{L}). Heavy chains have four domains, the V region (VH) and three or four domains in the C region (C_{H}1, C_{H}2, C_{H}3 and C_{H}4), and, in some cases, hinge region. Each heavy chain is linked to a light chain by a disulfide bond, and the two heavy chains are linked to each other by disulfide bonds. Linkage of the heavy chains is mediated by a flexible region of the heavy chain, known as the hinge region.

[0423] Cetuximab contains variable regions from mouse monoclonal antibody 225 (M225) and human constant regions, including a human IgG1 heavy chain constant region (SEQ ID NO:1069) and a human Cκ light chain constant region (SEQ ID NO:1071). The complete heavy chain of cetuximab has a sequence of amino acids set forth in SEQ ID NO:1, encoded by a sequence of nucleotides set forth in SEQ ID NO:1111, and the light chain has a sequence of amino acids set forth in SEQ ID NO:2, encoded by a sequence of nucleotides set forth in SEQ ID NO:1110. The heavy chain is composed of a mouse variable domain (V_{H}, amino acid residues 1-119 of SEQ ID NO:1, set forth in SEQ ID NO:3), and human constant domains C_{H}1-C_{H}2-hinge-C_{H}3, including C_{H}1 (amino acid residues 120-222 of SEQ ID NO:1), a hinge region (amino acid residues 223-238 of SEQ ID NO:1), C_{H}2 (amino acid residues 239-342 of SEQ ID NO:1) and C_{H}3 (amino acid residues 343-449 of SEQ ID NO:1). The light chain is composed of a mouse variable domain (V_{L}, amino acid residues 1-107 of SEQ ID NO:2, set forth in SEQ ID NO:4) and a human kappa light constant region (Cκ, amino acid residues 108-213 of SEQ ID NO:2).

[0424] The CDRs of cetuximab include, V_{H} CDR 1 (amino acid residues 26-35, according to AbM definition (Martin et al. (1989) Proc Natl Acad Sci USA 86:9268-9272; Martin et al. (1991) Methods Enzymol 203:121-153; Pederson et al. (1992) Immunomethods 1:126), or amino acid residues 31-35, according to Kabat definition, of SEQ ID NO:3, set forth in SEQ ID NOS:15 and 15, respectively); V_{H} CDR 2 (amino acid residues 50-65 of SEQ ID NO:3, set forth in SEQ ID NO:16); V_{H} CDR 3 (amino acid residues 98-108 of SEQ ID NO:3, set forth in SEQ ID NO:17); V_{L} CDR 1 (amino acid residues 24-34 of SEQ ID NO:4, set forth in SEQ ID NO:18); V_{L} CDR 2 (amino acid residues 50-56 of SEQ ID NO:4, set forth in SEQ ID NO:19); and V_{L CDR} 3 (amino acid residues 89-97 of SEQ ID NO:4, set forth in SEQ ID NO:20).

[0425] According to the Kabat numbering (Kabat, E. A. et al. (1991) Sequences of Proteins of Immunological Interest, Fifth Edition, U.S. Department of Health and Human Services, NIH Publication No. 91-3242), the CDRs of cetuximab include V_{H} CDR 1 (amino acid residues 26-35, according to AbM definition, or amino acid residues 31-35, according to Kabat definition); V_{H} CDR 2 (amino acid residues 50-65); V_{H} CDR 3 (amino acid residues 95-102); V_{L} CDR 1 (amino acid residues 24-34); V_{L} CDR 2 (amino acid residues 50-56); and V_{L} CDR 3 (amino acid residues 89-97).

[0426] The crystal structure of cetuximab Fab bound to the extracellular domain of the EGFR (sEGFR) has previously been determined (Li et al., (2005) Cancer Cell 7:301-311). Cetuximab binds to domain III of the epidermal growth factor receptor (amino acids 310-514 of SEQ ID NO:6), with an epitope that partially overlaps with the natural ligand epidermal growth factor. Residues ^{L27}Gln, ^{L50}Tyr, ^{L94}Trp, ^{H52}Trp, ^{H58}Asp, ^{H101}Tyr, ^{H102}Tyr, ^{H103}Asp and ^{H104}Tyr of cetuximab make contacts with domain III of sEGFR. The light chain of cetuximab binds to the C-terminal domain of EGFR, with V_{L} CDR 1 residue ^{L27}Gln of cetuximab binding to residue N473 of sEGFR. V_{H} CDR 3 residue ^{H102}Tyr protrudes into a hydrophobic pocket on the surface of a large β sheet of domain III, making hydrogen bonds to glutamine side chains of Q384 and Q408 of sEGFR. V_{H} CDR 2 and V_{H} CDR 3 lie over the hydrophobic pocket, anchored by side chain to side chain hydrogen bonds between ^{H52}Trp and S418 of sEGFR and ^{H104}Tyr and S468 of sEGFR, side chain to main chain interactions between ^{H54}Gly and ^{H103}Asp carbonyl oxygens and sEGFR S440 and R353, and indirect hydrogen bonds between ^{H56}Asn and S418 and Q384 of sEGFR. In addition to blocking the binding of EGF to sEGFR, the variable heavy chain of cetuximab sterically blocks domain I thereby preventing domain II from adopting a conformation necessary for dimerization.

[0427] Other variants of cetuximab have been reported and are known. Hu225, a humanized version of cetuximab, that has a variable heavy chain that has a sequence of amino acids set forth in SEQ ID NO:28, and a variable light chain that has a sequence of amino acids set forth in SEQ ID NO:29. Compared to Cetuximab (225), Hu225 contains amino acid replacements at amino acid residues in the framework regions, including replacement (substitution) in the variable light chain (V_{L}) at positions corresponding to replacement of Valine (V) at position 9 with Glycine (G), I10T, V13L, V19A, 520T, F21L, R39K, T40P, N41G, G42Q, S43A, S60D, S74T, N76S, S77R, V78L, S80P, I83F, D85V, A100Q and L106I, in the sequence of amino acids set forth in SEQ ID NO:4 (Hu225 V_{L} set forth in SEQ ID NO:29), and replacement (substitution) in the variable heavy chain (V_{H}) at positions corresponding to replacement of Glutamine (Q) at position 1 with Glutamic acid (E), KSV, Q6E, P9G, S16G, Q17G, S19R, I20L, T21S, T23A, V24A, S40A, S68T, S76N, Q77T, F79Y, F80L, K81Q, Q86R, S87A, N88E, 192V and A119S, in the sequence of amino acids set forth in SEQ ID NO:3 (Hu225 V_{H} set forth in SEQ ID NO:28). Additional cetuximab variants include those having a heavy chain set forth in SEQ ID NO:8 and a light chain set forth in SEQ ID NO:9. Further a number of other variants have been described and are known in the art (see e.g. U.S. Pat. Nos. 7,657,380, 7,930,107, 7,060,808, 7,723,484, U.S. Pat. Publ. Nos. 2011014822, 2005142133, 2011117110, International Pat. Pub. Nos. WO2012003995, WO2010080463, WO2012020059, WO2008152537, and Lippow et al. (2007) Nat Biotechnol. 25(10):1171-1176). The modifications described herein can be in any cetuximab, antigen-binding fragment thereof or variant thereof, including any known in the art.

[0428] b. Function

[0429] Cetuximab binds to the extracellular domain of EGFR on both normal and tumor cells preventing ligand binding and subsequent activation (Li et al., (2005) Cancer Cell 7:301-311; Blick et al., (2007) Drugs 67(17):2585-2607). Cetuximab competitively inhibits the binding of epidermal growth factor and transforming growth factor alpha (TGF-alpha) preventing cell growth and metastatic spread. That is, binding of cetuximab blocks phosphorylation and activation of tyrosine-receptor kinases, resulting in inhibition of cell growth, induction of apoptosis, decreased matrix metalloprotease secretion and reduced vascular endothelial growth factor production. Cetuximab can also induce an antitumor effect through inhibition of angiogenesis. Cetuximab inhibits expression of VEGF, IL-8 and bFGF in the highly metastatic human TCC 253JB-V cells a dose dependent manner and decrease microvessel density (Perrotte et al. (1999), Clin. Cancer Res., 5:257-264). Cetuximab can down-regulate VEGF expression in tumor cells in vitro and in vivo (Petit et al. (1997), Am. J. Pathol., 151:1523-1530; Prewett et al. (1998), Clin. Cancer Res. 4:2957-2966). Cetuximab is also be involved in antibody-dependent cellular cytotoxicity (ADCC) and receptor internalization.

### C. MODIFIED ANTI-EGFR ANTIBODIES AND CONDITIONALLY ACTIVE ANTI-EGFR ANTIBODIES

[0430] Provided herein are conditionally active anti-EGFR antibodies or antigen-binding fragments, such as modified or variant anti-EGFR antibodies or antigen binding fragments thereof, that exhibit higher or greater activity in a tumor microenvironment than in a non-diseased or non-tumor microenvironment environment, such as the skin or basal layer of the skin. Such antibodies include any that exhibit greater binding activity for human epidermal growth factor receptor (EGFR), or a soluble fragment thereof, under conditions that exist in a non-tumor environment compared to under conditions that exist in a non-tumor microenvironment (e.g. basal layer of skin). By virtue of exhibiting greater binding activity in a tumor microenvironment, the anti-EGFR antibodies provided herein exhibit selective activity against tumors, and reduced binding activity to cells in non-tumor microenvironments. Such selectivity achieved by their conditional binding activity minimizes the undesired activity on non-tumor cells, such as basal keratinocytes of the skin. Thus, the anti-EGFR antibodies, or antigen binding fragments thereof, provided herein confer reduced or fewer side effects when administered to subjects.

[0431] An altered pH microenvironment is the most common microenvironment found in tumor microenvironments (see e.g. Fogh Andersen et al. (1995) Clin. Chem., 41:1522-1525; Bhujwalla et al. (2002) NMR Biomed., 15:114-119; Helmlinger et al. (1997) Nature Med., 3:177; Gerweck and Seetharaman (1996), Cancer Res. 56(6):1194-1198). For example, in many tumors the ‘Warburg effect’ creates a microenvironment with a pH ranging from 5.6 to 6.8. Also, elevated lactate levels have been found associated with a variety of tumors including, but not limited to, head and neck, metastatic colorectal cancer, cervical cancer and squamous cell carcinoma (see e.g., Walenta et al. (1997) American Journal of Pathology 150(2): 409-415; Schwickert et al. (1995) Cancer Research 55: 4757-4759; Walenta et al. (2000) Cancer Research 60: 916-921; Guo et al. (2004) J Nucl Med 45: 1334-1339; Mathupala et al. (2007) J Bioenerg Biomembr 39: 73-77; Holroyde et al. (1979) Cancer Research 39: 4900-4904; Schurr and (2007) Neuroscience 147: 613-619; Quenneta et al. (2006) Radiotherapy and Oncology 81: 130-135). In many tumors, the ‘Warburg effect’ creates a microenvironment with lactate concentrations between 10 to 15 mM. In contrast to the tumor microenvironment, the dermis, where many side effects that result from administration of anti-EGFR antibodies are localized, exhibits a neutral pH and normal lactate levels.

[0432] The anti-EGFR antibodies provided herein, including modified anti-EGFR antibodies and antigen binding fragments of any of the anti-EGFR antibodies, bind to EGFR (particularly human EGFR) with a higher binding activity under conditions that exist in a tumor microenvironment that include one or both of pH between or about between pH 5.6 to 6.8 or lactate concentration of between or about between 5 mM to 20 mM compared to under conditions that exist in a non-tumor microenvironment that include one or both of pH between or about between pH 7.0 to 7.8 or lactate concentration between or about between 0.5 mM to 5 mM. The higher binding activity under conditions in a tumor microenvironment compared to under conditions in a non-tumor microenvironment can be a ratio of activity of at least or greater than 1.1, 1.2, 1.3, 1.4, 1.5, 1.6, 1.7, 1.8, 1.9, 2.0, 2.5, 3.0, 3.5, 4.0, 4.5, 5.0, 6.0, 7.0, 8.0, 9.0, 10.0, 11.0, 12.0, 13.0, 14.0, 15.0, 20.0, 25.0, 30.0, 35.0, 40.0, 45.0, 50.0 or more.

[0433] In general, the ratio of activity is exhibited in the presence of physiological levels of protein. In an in vivo or physiological environment, the interstitial protein concentration (such as albumin) is anywhere from 20-50% of plasma. Serum contains about 60-80 g/L protein, and various tissues have been demonstrated to contain 12 mg/mL to 40 mg/mL interstitial protein (see e.g. Aukland and Reed (1993) Physiological Reviews, 73:1-78). Hence, anti-EGFR antibodies that exhibit selective and conditional activity in vivo under these conditions, exhibit the ratio of activity in the presence of 10 mg/mL to 50 mg/mL protein, such as at least at least 12 mg/mL to 40 mg/mL protein (e.g. at least 12 mg/mL, 15 mg/mL, 20 mg/mL, 25 mg/mL, 30 mg/mL, 35 mg/mL or 40 mg/mL protein), which, for example, can be provided in serum, such as human serum, or as a serum albumin, such as human serum albumin, or other protein that does not interact with the antibody or receptor or otherwise directly alters antibody-receptor interactions. For example, the protein is provided in serum, and assays and methods to select or characterize anti-EGFR antibodies are performed in the presence of 20% to 50% serum (vol/vol), such as 20% to 50% human serum, such as at least 20%, 25%, 30%, 35%, 40%, 45% or 50% serum (vol/vol). Hence, in particular examples herein, the anti-EGFR antibodies provided herein, including modified anti-EGFR antibodies and antigen binding fragments of any of the anti-EGFR antibodies, bind to EGFR (particularly human EGFR) with a higher binding activity under conditions that exist in a tumor microenvironment that include one or both of pH between or about between pH 5.6 to 6.8 or lactate concentration of between or about between 5 mM to 20 mM and 10 mg/mL to 50 mg/mL protein (e.g. 20% to 50% human serum), compared to under conditions that exist in a non-tumor microenvironment that include one or both of pH between or about between pH 7.0 to 7.8 or lactate concentration between or about between 0.5 mM to 5 mM and 10 mg/mL to 50 mg/mL protein (e.g. 20% to 50% human serum). The higher binding activity under conditions in a tumor microenvironment compared to under conditions in a non-tumor microenvironment generally exists under conditions where the protein concentration under conditions in a tumor microenvironment and under conditions in a non-tumor microenvironment is substantially the same or is the same. In particular examples, the ratio of activity can be at least or greater than 1.1, 1.2, 1.3, 1.4, 1.5, 1.6, 1.7, 1.8, 1.9, 2.0, 2.5, 3.0, 3.5, 4.0, 4.5, 5.0, 6.0, 7.0, 8.0, 9.0, 10.0, 11.0, 12.0, 13.0, 14.0, 15.0, 20.0, 25.0, 30.0, 35.0, 40.0, 45.0, 50.0 or more.

[0434] In particular, the antibodies provided herein include those that bind to epidermal growth factor receptor (EGFR) with a higher binding activity at pH 6.0 to pH 6.5 than at a neutral pH (e.g. 7.4), and in the presence of 10 mg/mL to 50 mg/mL protein, such as at least at least 12 mg/mL to 40 mg/mL protein (e.g. at least 12 mg/mL, 15 mg/mL, 20 mg/mL, 25 mg/mL, 30 mg/mL, 35 mg/mL or 40 mg/mL protein). For example, the antibodies provided herein include those that bind to epidermal growth factor receptor (EGFR) with a higher binding activity at pH 6.0 to pH 6.5 than at a neutral pH (e.g. 7.4), and in the presence of 20% to 50% serum (vol/vol), such as 20% to 50% human serum, such as at least 20%, 25%, 30%, 35%, 40%, 45% or 50% serum (vol/vol). For example, the ratio of binding activity under conditions of pH 6.0 to pH 6.5 compared to under conditions at neutral pH (e.g. pH 7.4) is greater than 1.0, for example, at least or greater than 1.1, 1.2, 1.3, 1.4, 1.5, 1.6, 1.7, 1.8, 1.9, 2.0, 2.5, 3.0, 3.5, 4.0, 4.5, 5.0, 6.0, 7.0, 8.0, 9.0, 10.0, 11.0, 12.0, 13.0, 14.0, 15.0, 20.0, 25.0, 30.0, 35.0, 40.0, 45.0, 50.0 or more.

[0435] Included among the conditionally active antibodies provided herein, including modified anti-EGFR antibodies herein, are those that bind to epidermal growth factor receptor (EGFR) with a higher binding activity at an elevated lactate concentration of between 10 to 20 mM than a lactate concentration of 0.5 mM to 5 mM, and in the presence of 10 mg/mL to 50 mg/mL protein, such as at least at least 12 mg/mL to 40 mg/mL protein (e.g. at least 12 mg/mL, 15 mg/mL, 20 mg/mL, 25 mg/mL, 30 mg/mL, 35 mg/mL or 40 mg/mL protein). For example, the conditionally active antibodies provided herein, including modified anti-EGFR antibodies herein, are those that bind to epidermal growth factor receptor (EGFR) with a higher binding activity at an elevated lactate concentration of between 10 to 20 mM than a lactate concentration of 0.5 mM to 5 mM, and in the presence of 20% to 50% serum (vol/vol), such as 20% to 50% human serum, such as at least 20%, 25%, 30%, 35%, 40%, 45% or 50% serum (vol/vol). For example, the ratio of binding activity under conditions of 10 to 20 mM lactate, such as at or about 16 mM, compared to under conditions of 1 mM to 5 mM is greater than 1.0, for example, at least or greater than 1.1, 1.2, 1.3, 1.4, 1.5, 1.6, 1.7, 1.8, 1.9, 2.0, 2.5, 3.0, 3.5, 4.0, 4.5, 5.0, 6.0, 7.0, 8.0, 9.0, 10.0, 11.0, 12.0, 13.0, 14.0, 15.0, 20.0, 25.0, 30.0, 35.0, 40.0, 45.0, 50.0 or more or more.

[0436] In some examples, the anti-EGFR antibodies provided herein exhibit increased binding activity under conditions of pH 6.0 or pH 6.5 and lactate concentration of 10 mM to 20 mM than under conditions of neutral pH (about pH 7.4) and lactate concentration of 1 mM to 5 mM, and in the presence of 10 mg/mL to 50 mg/mL protein, such as at least at least 12 mg/mL to 40 mg/mL protein (e.g. at least 12 mg/mL, 15 mg/mL, 20 mg/mL, 25 mg/mL, 30 mg/mL, 35 mg/mL or 40 mg/mL protein). For example, the anti-EGFR antibodies provided herein exhibit increased binding activity under conditions of pH 6.0 or pH 6.5 and lactate concentration of 10 mM to 20 mM than under conditions of neutral pH (about pH 7.4) and lactate concentration of 1 mM to 5 mM, and in the presence of 20% to 50% serum (vol/vol), such as 20% to 50% human serum, such as at least 20%, 25%, 30%, 35%, 40%, 45% or 50% serum (vol/vol). For example, the ratio of binding activity under conditions of pH 6.0 or 6.5 and 10 to 20 mM lactate, such as or about 16 mM, compared to under conditions of neutral pH (e.g. 7.4) and 1 mM to 5 mM lactate is greater than 1.0, for example, at least or greater than 1.1, 1.2, 1.3, 1.4, 1.5, 1.6, 1.7, 1.8, 1.9, 2.0, 2.5, 3.0, 3.5, 4.0, 4.5, 5.0, 6.0, 7.0, 8.0, 9.0, 10.0, 11.0, 12.0, 13.0, 14.0, 15.0, 20.0, 25.0, 30.0, 35.0, 40.0, 45.0, 50.0 or more or more.

[0437] The ratio of binding activity under the above conditions in a tumor microenvironment compared to under conditions in a non-tumor microenvironment can be determined or assessed based on any methods known to a person of skill in the art to assess binding of an antibody, or antigen-binding fragment, to EGFR (e.g. human EGFR). Exemplary of such assays are described in Section D. In one example, the binding activity is determined in vitro in a solid-phase binding assay, such as in an immunoassay (e.g. an enzyme-linked immunosorbent assay; ELISA) under any of the above conditions in a tumor microenvironment and any of the above conditions in a non-tumor microenvironment. In such examples, the binding activity can be represented as a spectrophotometric measurement (e.g. optical density and an absorbance wavelength compatible with the particular detection methods employed), and the ratio of binding activity can be the ratio of the spectrophotometric measurement for binding under conditions that exist in a tumor microenvironment compared to under conditions that exist in a non-tumor microenvironment at the same concentration of antibody (e.g. an antibody concentration of 1 ng/mL to 100 ng/mL). This is exemplified in the Examples herein. An anti-EGFR antibody, or antigen-binding fragment thereof, is a conditionally active antibody if the ratio of activity as determined from spectrophotometric measurements or other similar quantitative measurements in a solid-phase immunoassay that is greater than 1.0, for example, at least or greater than 1.1, 1.2, 1.3, 1.4, 1.5, 1.6, 1.7, 1.8, 1.9, 2.0, 2.5, 3.0, 3.5, 4.0, 4.5, 5.0, 6.0, 7.0, 8.0, 9.0, 10.0, 11.0, 12.0, 13.0, 14.0, 15.0, 20.0, 25.0, 30.0, 35.0, 40.0, 45.0, 50.0 or more or more.

[0438] In another example, the binding activity is determined as a kinetic measure of binding (e.g. dissociation constant, K_{D}, association constant K_{A}, off-rate or other kinetic parameter of binding affinity) under any of the above conditions in a tumor microenvironment and any of the above conditions in a non-tumor microenvironment. Such measurements can be determined using any binding assay known to a skilled artisan. In particular examples, an affinity-based biosensor technology is utilized as a measure of binding affinity. Exemplary biosensor technologies include, for example, Biacore technologies, BioRad ProteOn, Reichert, GWC Technologies, IBIS SPIR Imaging, Nomadics SensiQ, Akubio RAPid, ForteBio Octet, IAsys, Nanofilm and others (see e.g. Rich et al. (2009) Analytical Biochemistry, 386:194-216). In such examples, the binding activity can be represented as a the dissociation constant (K_{D}), and the ratio of binding activity can be the ratio of tighter affinity binding under conditions that exist in a tumor microenvironment compared to under conditions that exist in a non-tumor microenvironment. For example, a ratio of binding activity of at least 2.0 means that there is at least 2-fold tighter affinity, a ratio of binding activity of at least 3.0 means that there is at least 3-fold tighter affinity, a ratio of binding activity of at least 4.0 means that there is at least 4-fold tighter affinity, a ratio of binding activity of at least 5.0 means that there is at least 5-fold tighter affinity, a ratio of binding activity of at least 10.0 means that there is at least 10-fold tighter affinity, where the ratio of each is under conditions in the tumor microenvironment compared to under conditions in a non-tumor microenvironment. The anti-EGFR antibodies, or antigen-binding fragments provided herein, typically have a dissociation constant (K_{D}) for binding EGFR (e.g. human EGFR) or a soluble fragment thereof that is less than 1×10⁻⁸M, 5×10⁻⁹ M, 1×10⁻⁹M, 5×10⁻¹⁰ M, 1×10⁻¹⁰ M, 5×10⁻¹¹ M, 1×10⁻¹¹ M or less under conditions that exist in a tumor microenvironment. In another example, the binding activity can be represented as the off-rate, and the ratio of binding activity can be the ratio of the k_{off} under conditions that exist in a tumor microenvironment compared to under conditions that exist in a non-tumor microenvironment. For example, a ratio of binding activity of at least 2.0 means that the antibody exhibits an off-rate that is at least 2 times slower, a ratio of binding activity of at least 3.0 means that the antibody exhibits an off-rate that is at least 3 times slower, a ratio of binding activity of at least 4.0 means that the antibody exhibits an off-rate that is at least 4 times slower, a ratio of binding activity of at least 5.0 means that the antibody exhibits an off-rate that is at least 5 times slower, a ratio of binding activity of at least 10.0 means that the antibody exhibits an off-rate that is at least 10 times slower, where the ratio of each is under conditions in the tumor microenvironment compared to under conditions in a non-tumor microenvironment. This is exemplified in the Examples herein. An anti-EGFR antibody, or antigen-binding fragment thereof, is a conditionally active antibody if the ratio of activity as determined using kinetic measurements of binding is greater than 1.0, for example, at least or greater than 1.1, 1.2, 1.3, 1.4, 1.5, 1.6, 1.7, 1.8, 1.9, 2.0, 2.5, 3.0, 3.5, 4.0, 4.5, 5.0, 6.0, 7.0, 8.0, 9.0, 10.0, 11.0, 12.0, 13.0, 14.0, 15.0, 20.0, 25.0, 30.0, 35.0, 40.0, 45.0, 50.0 or more or more.

[0439] In a further example, the binding activity is determined in an in vivo binding activity assay assessing binding in a tumor microenvironment and binding in a non-tumor microenvironment. Exemplary of a non-tumor microenvironment is binding of the antibody to the basal layer of the skin containing keratinocytes. The binding assays can be performed using animal models known to contain cells expressing EGFR in each environment. In particular, the animal models express human EGFR. For example, a murine animal model or other mammalian animal model can be used that is generated by xenograft procedures to engineer microenvironments to contain tumor or non-tumor cells expressing human EGFR. This is exemplified herein using tumor xenograft procedures (e.g. with A431 cells or other human tumor cells) and skin xenograft procedures. In such examples, the antibody, or antigen-binding fragment thereof, is detectably labeled, for example fluorescently labeled. In such examples, the binding activity can be represented as the detectable signal produced (e.g. intensity of the fluorescent signal), and the ratio of binding activity can be the ratio of the intensity of the detectable signal (e.g. fluorescent signal) for binding under conditions that exist in a tumor microenvironment compared to under conditions that exist in a non-tumor microenvironment. The staining intensity can be normalized by normalizing to staining of a control or reference antibody. This is exemplified in the Examples herein. An anti-EGFR antibody, or antigen-binding fragment thereof, is a conditionally active antibody if the ratio of activity as determined from in vivo binding in the two environments is greater than 1.0, for example, at least or greater than 1.1, 1.2, 1.3, 1.4, 1.5, 1.6, 1.7, 1.8, 1.9, 2.0, 2.5, 3.0, 3.5, 4.0, 4.5, 5.0, 6.0, 7.0, 8.0, 9.0, 10.0, 11.0, 12.0, 13.0, 14.0, 15.0, 20.0, 25.0, 30.0, 35.0, 40.0, 45.0, 50.0 or more or more.

[0440] By virtue of the conditional activity in a tumor microenvironment, such as increased binding activity under conditions present in a tumor microenvironment (e.g. low pH, such as pH 6.0 and elevated lactate, such as 10 to 20 mM), the antibodies provided herein exhibit increased inhibitory activity against EGFR in a tumor microenvironment compared to a non-diseased environment. Such inhibitory activities include, but are not limited to, inhibition of ligand-induced phosphorylation, dimerization and/or cell growth. As a result of such activities, antibodies provided herein exhibit tumor growth inhibition when administered in vivo to a subject having a tumor, such as a solid tumor. Tumor growth can be inhibited 30%, 40%, 50%, 60%, 70%, 80%, 90% or more compared to the growth of tumors in the absence of administered antibody. The functional activity of the anti-EGFR antibodies provided herein can be less than, similar to or greater than existing anti-EGFR therapies, such as therapies with cetuximab, when assessed in tumor models, so long as the activity in non-diseased tissues is reduced (e.g. incidence of skin rash). For example, the anti-EGFR antibodies provided herein exhibit efficacy in vivo in an in vivo animal tumor model, such as an A431 model as described herein, similar to cetuximab with a lower binding affinity (higher Kd) than cetuximab.

[0441] The conditionally active anti-EGFR antibodies provided herein, such as modified anti-EGFR antibodies provided herein, exhibit conditional and selective tumor-specific activity such that, upon administration to a subject, the subject exhibits reduced or fewer side effects, compared to the subject that is administered another existing anti-EGFR therapy, such as therapy with cetuximab (e.g. the corresponding form of a wildtype cetuximab having a heavy chain sequence of amino acids set forth in SEQ ID NO:1 and a light chain sequence of amino acids set forth in SEQ ID NO:2, or a heavy chain sequence of amino acids set forth in SEQ ID NO:8 and a light chain sequence of amino acids set forth in SEQ ID NO:9). For example, the provided anti-EGFR antibodies, or antigen binding fragments thereof, exhibit reduced dermal toxicity. Dermal toxicity, such as skin rash, can be assessed by standard assays known to one of skill in the art and described herein. For example, the anti-EGFR antibodies, or antigen binding fragments thereof, provided herein exhibit at least a 1.5-fold, 2-fold, 2.5-fold, 3-fold, 4-fold, 5-fold, or more decreased rash, such as assessed in a primate model.

[0442] It is within the level of a skilled artisan to identify or generate conditionally active anti-EGFR antibodies, or antigen-binding fragments thereof, that exhibit greater activity in a tumor microenvironment than in a non-tumor microenvironment as described herein. For example, anti-EGFR antibodies can be generated, including libraries of modified anti-EGFR antibodies, and can be screened using procedures and methods described herein in Section D. In the subsections below, exemplary anti-EGFR antibodies, including exemplary modified anti-EGFR antibodies derived from cetuximab or an antigen-binding fragment or variant thereof, that exhibit the altered properties and activities described above are set forth. It is understood that the resulting anti-EGFR antibody, or antigen-binding fragment thereof, minimally contains a variable heavy chain and a variable light chain, or a portion thereof that is sufficient to bind EGFR antigen (e.g. human EGFR), or a soluble fragment thereof, when assembled into an antibody.

[0443] 1. Modified Anti-EGFR Antibodies

[0444] Provided herein are modified or variant anti-EGFR antibodies, or antigen binding fragments thereof. Included among the modified anti-EGFR antibodies are antibodies that are conditionally active such that they exhibit higher or greater activity in a tumor microenvironment than in a non-diseased environment, such as the skin or basal layer of the skin. The antibodies provided herein are variants of the anti-EGFR antibody cetuximab or derivatives thereof. It is understood that the resulting anti-EGFR antibody, or antigen-binding fragment thereof, minimally contains a variable heavy chain and a variable light chain, or a portion thereof that is sufficient to bind EGFR antigen (e.g. human EGFR), or a soluble fragment thereof, when assembled into an antibody, whereby one or both of the variable heavy or light chain is modified. As described above, included among such modified anti-EGFR antibodies, or antigen-binding fragments thereof, are antibodies that bind to EGFR (particularly human EGFR) with a higher binding activity under conditions that exist in a tumor microenvironment that include one or both of pH between or about between pH 5.6 to 6.8 (e.g. pH 6.0 to 6.5) or lactate concentration of between or about between 5 mM to 20 mM (e.g. 10 mM to 20 mM, such as at least 16 mM) compared to under conditions that exist in a non-tumor microenvironment that include one or both of pH between or about between pH 7.0 to 7.8 (e.g. pH of 7.0 to 7.4) or lactate concentration between or about between 0.5 mM to 5 mM (e.g. 1 mM to 4 mM). The higher binding activity under conditions in a tumor microenvironment compared to under conditions in a non-tumor microenvironment can be a ratio of activity of at least or greater than 1.1, 1.2, 1.3, 1.4, 1.5, 1.6, 1.7, 1.8, 1.9, 2.0, 2.5, 3.0, 3.5, 4.0, 4.5, 5.0, 6.0, 7.0, 8.0, 9.0, 10.0, 11.0, 12.0, 13.0, 14.0, 15.0, 20.0, 25.0, 30.0, 35.0, 40.0, 45.0, 50.0 or more.

[0445] The modified anti-EGFR antibodies provided herein include those that exhibit increased or decreased or similar of the binding activity at pH 6.0 or pH 6.5 than the corresponding form of an unmodified cetuximab antibody, antigen-binding fragment thereof or variant thereof, such as a wildtype cetuximab having a heavy chain sequence of amino acids set forth in SEQ ID NO:1 and a light chain sequence of amino acids set forth in 2, or a heavy chain sequence of amino acids set forth in SEQ ID NO:8 and a light chain sequence of amino acids set forth in SEQ ID NO:9. In some examples, the antibodies exhibit at least 20%, 30%, 40%, 50%, 60%, 70%, 80%, 90%, 95% or more binding activity at pH 6.0 than the corresponding form of an unmodified cetuximab antibody, antigen-binding fragment thereof or variant thereof, such as a wildtype cetuximab having a heavy chain sequence of amino acids set forth in SEQ ID NO:1 and a light chain sequence of amino acids set forth in 2, or a heavy chain sequence of amino acids set forth in SEQ ID NO:8 and a light chain sequence of amino acids set forth in SEQ ID NO:9. Generally, the modified anti-EGFR antibodies provided herein exhibit 100% to 500%, such as at least 100% or more (i.e. increased) of the binding activity, such as at or about or at least 100%, 105%, 110%, 115%, 120%, 125%, 130%, 135%, 140%, 145%, 150%, 155%, 160%, 165%, 170%, 175%, 180%, 185%, 190%, 195%, 200%, 250%, 300%, 350%, 400%, 450%, 500%, or more of the binding activity at pH 6.0 or pH 6.5 compared to the binding activity of the corresponding form of an unmodified cetuximab antibody, antigen-binding fragment thereof or variant thereof, such as the wildtype cetuximab having a heavy chain sequence of amino acids set forth in SEQ ID NO:1 and a light chain sequence of amino acids set forth in SEQ ID NO:2, or a heavy chain sequence of amino acids set forth in SEQ ID NO:8 and a light chain sequence of amino acids set forth in SEQ ID NO:9.

[0446] In some examples, the modified anti-EGFR antibodies provided herein exhibit 30% to 95% of the EGFR binding activity at pH 7.4 of a corresponding form of an unmodified cetuximab, antigen-binding fragment thereof or variant thereof, such as a cetuximab having a heavy chain set forth in SEQ ID NO:1 and a light chain set forth in SEQ ID NO:2 or having a heavy chain set forth in SEQ ID NO:8 and a light chain set forth in SEQ ID NO:9. For example, anti-EGFR antibodies provided herein exhibit at least 30% of the binding activity, such as at or about or at least 30%, 35%, 40%, 45%, 50%, 55%, 60%, 65%, 70%, 75%, 80%, 85%, 90%, or 95% of the binding activity at neutral pH (e.g. pH 7.4) of the reference or unmodified cetuximab not containing the amino acid modification (e.g. replacement). In particular examples, the antibodies provided herein retain or exhibit similar or increased binding activity at pH 6.0 or pH 6.5 compared to binding activity of the unmodified cetuximab antibody or antigen-binding fragment or variant thereof under the same conditions, but exhibit decreased binding activity at neutral pH (e.g. pH 7.4), such as less than 20%, 30%, 40%, 50%, 60%, 70%, 80%, 90%, 95% binding activity at pH 7.4 than the corresponding form of an unmodified cetuximab antibody, antigen-binding fragment thereof or variant thereof, such as a wildtype cetuximab having a heavy chain sequence of amino acids set forth in SEQ ID NO:1 and a light chain sequence of amino acids set forth in 2, or a heavy chain sequence of amino acids set forth in SEQ ID NO:8 and a light chain sequence of amino acids set forth in SEQ ID NO:9. For example, modified anti-EGFR antibodies provided herein include those that exhibit 30% to 95% of the EGFR binding activity at pH 7.4 and 100% to 500% of the EGFR binding activity at pH 6.0 of a reference anti-EGFR antibody that does not contain the modification, such as the corresponding form of cetuximab having a heavy chain set forth in SEQ ID NO:1 and a light chain set forth in SEQ ID NO:2 or having a heavy chain set forth in SEQ ID NO:8 and a light chain set forth in SEQ ID NO:9.

[0447] Included among the modified anti-EGFR antibodies provided herein are those that exhibit decreased, increased or similar EGFR binding activity at elevated lactate levels, e.g., 10-20 mM lactate. Generally, the antibodies exhibit at least 20%, 30%, 40%, 50%, 60%, 70%, 80%, 90%, 95% or more binding activity under conditions of 10 to 20 mM lactate concentration than the corresponding form of an unmodified cetuximab antibody, antigen-binding fragment thereof or variant thereof, such as the wildtype cetuximab having a heavy chain sequence of amino acids set forth in SEQ ID NO:1 and a light chain sequence of amino acids set forth in 2, or a heavy chain sequence of amino acids set forth in SEQ ID NO:8 and a light chain sequence of amino acids set forth in SEQ ID NO:9. In some cases, the antibodies exhibit increased binding activity under conditions of 10 to 20 mM lactate concentration, for example 100% to 500% of the activity, such as greater than 100% of the binding activity, for example at least or about at least 110%, 120%, 130%, 140%, 150%, 160%, 170%, 180%, 190%, 200%, 300%, 400%, 500% or more of the binding activity than the corresponding form of the unmodified cetuximab antibody, antigen-binding fragment or variant thereof, such as a wildtype cetuximab having a heavy chain sequence of amino acids set forth in SEQ ID NO:1 and a light chain sequence of amino acids set forth in 2, or a heavy chain sequence of amino acids set forth in SEQ ID NO:8 and a light chain sequence of amino acids set forth in SEQ ID NO:9.

[0448] In some examples, the modified anti-EGFR antibodies provided herein exhibit 30% to 95% of the EGFR binding activity at normal lactate levels (e.g., between 0 and 5 mM lactate) than the corresponding form of the unmodified cetuximab antibody, antigen-binding fragment or variant thereof, such as a wildtype cetuximab having a heavy chain sequence of amino acids set forth in SEQ ID NO:1 and a light chain sequence of amino acids set forth in SEQ ID NO:2, or a heavy chain sequence of amino acids set forth in SEQ ID NO:8 and a light chain sequence of amino acids set forth in SEQ ID NO:9. For example, the antibodies provided herein retain or exhibit similar binding activity under conditions of 10-20 mM lactate compared to binding activity of cetuximab under the same conditions, but exhibit decreased binding activity under conditions of 1 mM to 5 mM lactate, such as 20%, 30%, 40%, 50%, 60%, 70%, 80%, 90%, 95% or more binding activity under conditions of 1 mM to 5 mM lactate than the corresponding form of a wildtype cetuximab having a heavy chain sequence of amino acids set forth in SEQ ID NO:1 and a light chain sequence of amino acids set forth in 2, or a heavy chain sequence of amino acids set forth in SEQ ID NO:8 and a light chain sequence of amino acids set forth in SEQ ID NO:9. In yet other examples, the modified anti-EGFR antibodies provided herein exhibit 30% to 95% of the EGFR binding activity at normal lactate levels (e.g., between 0 and 5 mM lactate, and 100% to 500% of the EGFR binding activity at elevated lactate levels (e.g., 10-20 mM lactate) of a reference or unmodified anti-EGFR antibody that does not contain the modification, such as compared to the corresponding form of a wildtype cetuximab having a heavy chain sequence of amino acids set forth in SEQ ID NO:1 and a light chain sequence of amino acids set forth in SEQ ID NO:2, or a heavy chain sequence of amino acids set forth in SEQ ID NO:8 and a light chain sequence of amino acids set forth in SEQ ID NO:9.

[0449] In exemplary examples provided herein, modified anti-EGFR antibodies provided herein exhibit 30% to 95% of the EGFR binding activity at pH 7.4, 100% to 500% of the EGFR binding activity at pH 6.0, 30% to 95% of the EGFR binding activity at normal lactate levels (e.g., between 0 and 5 mM lactate), and 100% to 500% of the EGFR binding activity at elevated lactate levels (e.g., 10-20 mM lactate), compared to a reference anti-EGFR antibody that does not contain the modification(s), such as to the corresponding form of a wildtype cetuximab having a heavy chain sequence of amino acids set forth in SEQ ID NO:1 and a light chain sequence of amino acids set forth in SEQ ID NO:2, or a heavy chain sequence of amino acids set forth in SEQ ID NO:8 and a light chain sequence of amino acids set forth in SEQ ID NO:9. For example, the modified anti-EGFR antibodies provided herein exhibit increased binding to EGFR at an acidic pH (e.g., pH 6.0), increased binding to EGFR at elevated lactate levels (e.g., 16.6 mM lactate), decreased binding to EGFR at a neutral pH (e.g., pH 7.4), and/or decreased binding to EGFR at normal lactate levels (e.g. 1 mM lactate).

[0450] In examples herein where binding activity is increased under conditions present in a tumor microenvironment, the provided antibodies can exhibit an increased binding affinity to EGFR at pH 6.0 or pH 6.5 and/or a decreased binding affinity at neutral pH (e.g. pH 7.4) compared to the corresponding form of an unmodified cetuximab or an antigen-binding fragment or variant thereof, such as a wildtype cetuximab having a heavy chain sequence of amino acids set forth in SEQ ID NO:1 and a light chain sequence of amino acids set forth in SEQ ID NO:2, or a heavy chain sequence of amino acids set forth in SEQ ID NO:8 and a light chain sequence of amino acids set forth in SEQ ID NO:9. In particular examples, the anti-EGFR antibodies provided herein exhibit at least a 1.5-fold, 2-fold, 2.5-fold, 3-fold, 4-fold, 5-fold or more decrease in binding affinity (e.g., Kd) in vitro at pH 7.4 while retaining comparable binding to EGFR at pH 6.0.

[0451] Exemplary of anti-EGFR antibodies, or antigen binding fragments thereof, provided herein are those that contain modifications compared to a reference anti-EGFR antibody having a heavy chain set forth in any of SEQ ID NOS:1, 3, 5, 8 or 28, and a light chain set forth in any of SEQ ID NOS:2, 4, 9, 10 or 29, or in a heavy chain that has a sequence of amino acids that is at least 65%, 70%, 75%, 80%, 85%, 86%, 87%, 88%, 89%, 90%, 91%, 92%, 93%, 94%, 95%, 96%, 97%, 98%, 99% identical to any of SEQ ID NOS:1, 3, 5, 8 or 28, and a light chain that has a sequence of amino acids that is at least 65%, 70%, 75%, 80%, 85%, 86%, 87%, 88%, 89%, 90%, 91%, 92%, 93%, 94%, 95%, 96%, 97%, 98%, 99% identical to any of SEQ ID NOS:2, 4, 9, 10 or 29. Included among the modified anti-EGFR antibodies provided herein are variants of the anti-EGFR antibody cetuximab that have altered properties as compared to cetuximab. In exemplary embodiments, the anti-EGFR antibodies, or antigen binding fragments thereof, are modified such that they are targeted to a tumor environment, for example, by binding EGFR under a condition or conditions that are associated with, or specific to, tumors.

[0452] The modifications described herein can be in any cetuximab anti-EGFR antibody or variant antibody thereof. For example, the modifications are made in cetuximab antibody containing: a heavy chain having a sequence of amino acids set forth in SEQ ID NO:1 and a light chain having a sequence set forth in SEQ ID NO:2, or a heavy chain having a sequence of amino set forth in SEQ ID NO:8 and a light chain having a sequence of amino acids set forth in SEQ ID NO:9, or in sequence variants of the heavy chain set forth in SEQ ID NO: 1 or 8 and/or the light chain set forth in SEQ ID NO:2 or 9 that exhibit at least 65%, 70%, 75%, 80%, 85%, 86%, 87%, 88%, 89%, 90%, 91%, 92%, 93%, 94%, 95%, 96%, 97%, 98%, 99% or more sequence identity to the heavy or light chain In some examples, the modifications are made in a humanized cetuximab antibody containing a heavy chain having a sequence of amino acids set forth in SEQ ID NO:28 and a light chain having a sequence of amino acids set forth in SEQ ID NO:29; or in sequence variants that exhibit at least 65%, 70%, 75%, 80%, 85%, 86%, 87%, 88%, 89%, 90%, 91%, 92%, 93%, 94%, 95%, 96%, 97%, 98%, 99% or more sequence identity to the heavy chain set forth in SEQ ID NO:28 and/or the light chain set forth in SEQ ID NO:29.

[0453] Generally, the modifications are made in the variable region of such antibodies. For example, the modifications are made in the heavy and/or light chain variable regions of such a cetuximab antibody, for example, in a sequence containing a variable heavy chain sequence set forth in SEQ ID NO:3 and a variable light chain sequence set forth in SEQ ID NO:4; or having a variable heavy chain sequence set forth in SEQ ID NO:3 and a variable light chain sequence set forth in SEQ ID NO:10. The resulting modified anti-EGFR antibodies can be full-length IgG1 antibodies, or can be fragments thereof, for example, a Fab, Fab′, F(ab′)₂, single-chain Fv (scFv), Fv, dsFv, diabody, Fd and Fd′ fragments. Further, the resulting modified anti-EGFR antibodies can contain a domain other than IgG 1.

[0454] The modifications can be a single amino acid modification, such as single amino acid replacements (substitutions), insertions or deletions, or multiple amino acid modifications, such as multiple amino acid replacements, insertions or deletions. Exemplary of modification are amino acid replacements, including single or multiple amino acid replacements. Modified anti-EGFR antibodies provided herein can contain at least or 1, 2, 3, 4, 5, 6, 7, 8, 9, 10, 11, 12, 13, 14, 15, 16, 17, 18, 19, 20, or more modified positions compared to the anti-EGFR antibody not containing the modification. In some examples, the modified anti-EGFR antibody provided contains only 1 or only 2 amino acid replacements compared to an unmodified cetuximab or antigen-binding fragment or variant thereof. The amino acid replacement can be a conservative substitution, such as set forth in Table 4, or a non-conservative substitution, such as any described herein. It is understood that an anti-EGFR antibody, or antigen-binding fragment thereof, containing an exemplary modification herein that confers conditional activity as described herein can be further modified by humanization as described below, as long as the resulting antibody retains conditional activity in a tumor microenvironment compared to a non-tumor microenvironment.

[0455] For purposes herein, reference to positions and amino acids for modification, including amino acid replacement or replacements, are with reference to the variable heavy chain set forth in SEQ ID NO:3 and the variable light chain set forth in SEQ ID NO:4. It is within the level of one of skill in the art to make any of the modifications provided herein in another anti-EGFR antibody by identifying the corresponding amino acid residue in another heavy chain, such as set forth in SEQ ID NOS:1, 5, 8 or 28, or another light chain, such as set forth in SEQ ID NOS:2, 9, 10 or 29, or variants thereof that exhibit at least 65%, 70%, 75%, 80%, 85%, 86%, 87%, 88%, 89%, 90%, 91%, 92%, 93%, 94%, 95%, 96%, 97%, 98%, 99% or more sequence identity to any of SEQ ID NOS: 1, 2, 5, 8-10 or 28-29. Corresponding positions in another anti-EGFR antibody can be identified by alignment of the anti-EGFR antibody heavy chain or light chain with the reference anti-EGFR heavy chain set forth in SEQ ID NO:3 or light chain set forth in SEQ ID NO:4. For example, FIG. 2 depicts alignment of anti-EGFR antibodies with SEQ ID NO:3 and 4, and identification of exemplary corresponding positions. For purposes of modification (e.g. amino acid replacement), the corresponding amino acid residue can be any amino acid residue, and need not be identical to the residues set forth in SEQ ID NO:3 or 4. Typically, the corresponding amino acid residue identified by alignment with residues in SEQ ID NO:3 or 4 is an amino acid residue that is identical to SEQ ID NO:3 or 4, or is a conservative or semi-conservative amino acid residue thereto (see e.g. FIG. 2). It is also understood that the exemplary replacements provided herein can be made at the corresponding residue in an anti-EGFR antibody heavy chain or light chain, so long as the replacement is different than exists in the unmodified form of the anti-EGFR antibody heavy chain or light chain. Based on this description and the description elsewhere herein, it is within the level of one of skill in the art to generate a modified anti-EGFR antibody containing any one or more of the described mutations, and test each for a property or activity as described herein.

[0456] Modifications in an anti-EGFR antibody also can be made to an anti-EGFR antibody that also contains other modifications, including modifications in the variable regions of the antibody and modifications in the constant regions of the antibody, for example, in the C_{H}1, hinge, C_{H}2, C_{H}3 or C_{L} regions.

[0457] The modified anti-EGFR antibodies provided herein can be produced by standard recombinant DNA techniques known to one of skill in the art. Any method known in the art to effect mutation of any one or more amino acids in a target protein can be employed. Methods include standard site-directed or random mutagenesis of encoding nucleic acid molecules, or solid phase polypeptide synthesis methods. For example, nucleic acid molecules encoding a heavy chain or light chain of an anti-EGFR antibody can be subjected to mutagenesis, such as random mutagenesis of the encoding nucleic acid, error-prone PCR, site-directed mutagenesis, overlap PCR, gene shuffling, or other recombinant methods. The nucleic acid encoding the anti-EGFR antibodies can then be introduced into a host cell to be expressed heterologously. Hence, also provided herein are nucleic acid molecules encoding any of the modified anti-EGFR antibodies provided herein.

[0458] A non-limiting example of exemplary modifications in the variable heavy chain and/or a variable light chain, or a portion thereof, of a cetuximab antibody or antigen-binding fragment thereof with reference to the variable heavy chain set forth in SEQ ID NO:3 and the variable light chain set forth in SEQ ID NO:4 are provided below.

[0459] a. Heavy Chain Modifications

[0460] Provided herein are modified anti-EGFR antibodies containing a modification(s), such as an amino acid replacement, in a variable heavy chain of a cetuximab antibody, antigen-binding fragment thereof or variant thereof, corresponding to amino acid residue(s) in a cetuximab antibody containing a variable heavy chain set forth in SEQ ID NO:3. The resulting modification(s) can be in a heavy chain, or portion thereof, such as set forth in any of SEQ ID NOS:1, 3, 5, 8 or 28 or a variant thereof having at least 75%, 80%, 81%, 82%, 83%, 84%, 85%, 86%, 86%, 88%, 89%, 90%, 91%, 92%, 93%, 94%, 95%, 96%, 97%, 98%, 99% or more sequence identity thereto. The modification can be in a complementarity determining region (CDR) or in a framework region.

[0461] For example, provided herein are modified anti-EGFR antibodies containing a variable heavy chain, or portion thereof, having at least one amino acid replacement or substitution at any of positions corresponding to positions 23, 24, 25, 26, 27, 28, 29, 30, 31, 32, 33, 34, 35, 36, 50, 51, 52, 53, 54, 55, 56, 57, 58, 59, 60, 61, 62, 63, 64, 65, 66, 67, 68, 69, 70, 71, 72, 73, 74, 75, 76, 77, 93, 94, 97, 98, 99, 100, 101, 102, 103, 104, 105, 106, 107, 108, 109, 110, 111 or 112 with reference to the amino acid positions set forth in SEQ ID NO:3. For example, the amino acid positions can be replacements at positions corresponding to replacement of Threonine (T) at position 23 (T23), V24, S25, G26, F27, S28, L29, T30, N31, Y32, G33, V34, H35, W36, V50, 151, W52, S53, G54, G55, N56, T57, D58, Y59, N60, T61, P62, F63, T64, S65, R66, L67, S68, 169, N70, K71, D72, N73, S74, K75, S76, Q77, Y93, Y94, R97, A98, L99, T100, Y101, Y102, D103, Y104, E105, F106, A107, Y108, W109, G110, Q111 or G112 with reference to the amino acid positions set forth in SEQ ID NO:3.

[0462] With reference to Kabat numbering, such positions in the heavy chain that can be modified, for example by amino acid replacement or substitution, include, but are not limited to, any of positions corresponding to positions 23, 24, 25, 26, 27, 28, 29, 30, 31, 32, 33, 34, 35, 36, 50, 51, 52, 53, 54, 55, 56, 57, 58, 59, 60, 61, 62, 63, 64, 65, 66, 67, 68, 69, 70, 71, 72, 73, 74, 75, 76, 77, 90, 91, 94, 95, 96, 97, 98, 99, 100, 100a, 100b, 100c, 101, 102, 103, 104, 105 or 106. In some examples, the amino acid residue that is modified (e.g. replaced) at the position corresponding to any of the above positions is a conservative residue or a semi-conservative amino acid residue to the amino acid set forth in SEQ ID NO:3 (see e.g. FIG. 2).

[0463] In one example, provided herein are modified anti-EGFR antibodies containing a variable heavy chain having a modification(s) in a CDR or CDRs, such as, for example, CDRH1, CDRH2 and/or CDRH3. For example, provided herein are modified anti-EGFR antibodies containing a variable heavy chain having one or more amino acid replacements in a CDR1 at any of positions corresponding to positions 26, 27, 28, 29, 30, 31, 32, 33, 34 or 35 with reference to the amino acid positions set forth in SEQ ID NO:3; CDR2 at any of positions corresponding to positions 50, 51, 52, 53, 54, 55, 56, 57, 58, 59, 60, 61, 62, 63, 64 or 65 with reference to the amino acid positions set forth in SEQ ID NO:3; CDR3 at any of positions corresponding to positions 98, 99, 100, 101, 102, 103, 104, 105, 106, 107 or 108 with reference to the amino acid positions set forth in SEQ ID NO:3.

[0464] In other examples, provided herein are modified anti-EGFR antibodies containing a variable heavy chain containing a modification(s) in a framework region (FW) heavy chain FW1, FW2, FW3 or FW4. For example, provided herein are modified anti-EGFR antibodies containing a variable heavy chain having one or more amino acid replacements in a heavy chain FW1 at any of positions corresponding to positions 23, 24 or 25 with reference to the amino acid positions set forth in SEQ ID NO:3; FW2 at any of positions corresponding to positions 36 or 37 with reference to the amino acid positions set forth in SEQ ID NO:3; FW3 at any of positions corresponding to positions 66, 67, 68, 69, 70, 71, 72, 73, 74, 75, 76, 77, 93, 94 or 97 with reference to the amino acid positions set forth in SEQ ID NO:3; and FW4 at any of positions corresponding to positions 109, 110, 111 or 112 with reference to the amino acid positions set forth in SEQ ID NO:3.

[0465] Provided herein are modified anti-EGFR antibodies having at least one amino acid replacement in the variable heavy chain, or portion thereof, corresponding to replacements set forth in Table 5 with reference to positions set forth in SEQ ID NO:3

TABLE 5
Exemplary heavy chain amino acid repacements

| | | | | | |
|---|---|---|---|---|---|
| T023K | T030H | G054D | S065P | N073R | T100S |
| T023H | T030R | G054P | S065Q | N073L | T100V |
| T023R | T030D | G054S | S065T | N073A | T100Y |
| T023A | T030G | G055H | S065W | N073C | Y101H |
| T023C | T030I | G055R | S065Y | N073G | Y101E |
| T023E | T030M | G055M | R066L | N073I | Y101F |
| T023G | T030N | G055S | R066A | N073M | Y101M |
| T023I | T030P | G055Y | R066C | N073P | Y101W |
| T023M | T030S | N056K | R066E | N073Q | Y102R |
| T023N | T030V | N056A | R066F | N073S | Y102C |
| T023P | T030W | N056P | R066N | N073T | Y102D |
| T023S | T030Y | N056S | R066P | N073V | Y102I |
| T023V | N031K | N056V | R066Q | N073W | Y102N |
| T023W | N031H | N056G | R066S | N073Y | Y102W |
| T023L | N031D | T057H | R066T | S074K | D103R |
| V024R | N031E | T057R | R066V | S074H | D103L |
| V024A | N031G | T057L | R066G | S074R | D103A |
| V024F | N031I | T057A | L067A | S074L | D103C |
| V024G | N031T | T057C | L067C | S074A | D103I |
| V024I | N031V | T057D | L067D | S074C | D103P |
| V024M | N031L | T057F | L067E | S074D | D103Q |
| V024P | Y032H | T057M | L067I | S074E | D103Y |
| V024S | Y032R | T057N | L067M | S074G | Y104H |
| V024T | Y032C | T057Q | L067Q | S074I | Y104L |
| V024L | Y032M | T057W | L067S | S074M | Y104D |
| V024E | Y032N | T057Y | L067T | S074P | Y104F |
| S025H | Y032T | D058L | L067V | S074T | Y104I |
| S025R | Y032V | D058G | L067Y | S074V | Y104M |
| S025A | Y032L | D058M | L067G | S074Y | Y104S |
| S025C | G033E | D058N | S068K | K075H | Y104V |
| S025D | G033M | D058Q | S068H | K075R | E105H |
| S025E | G033S | Y059H | S068R | K075L | E105T |
| S025F | G033T | Y059R | S068L | K075A | F106L |
| S025G | G033Y | Y059A | S068C | K075C | F106V |
| S025I | V034A | Y059C | S068D | K075E | F106W |
| S025M | V034C | Y059D | S068E | K075F | F106Y |
| S025P | V034I | Y059E | S068F | K075M | A107K |
| S025Q | V034M | Y059G | S068G | K075Q | A107H |
| S025T | V034P | Y059I | S068I | K075T | A107R |
| S025V | V034L | Y059P | S068N | K075V | A107L |
| S025L | H035I | Y059Q | S068Q | K075W | A107C |
| G026H | H035Q | Y059S | S068T | K075Y | A107D |
| G026R | W036K | Y059T | S068V | K075G | A107E |
| G026D | W036A | Y059V | I069A | K075P | A107G |
| G026F | W036I | Y059W | I069C | S076H | A107N |
| G026M | W036V | N060K | I069G | S076R | A107S |
| G026N | W036Y | N060A | I069Y | S076L | A107T |
| G026P | V050K | N060C | N070H | S076A | A107Y |
| G026Q | V050H | N060D | N070R | S076C | Y108K |
| G026S | V050A | N060F | N070L | S076D | Y108H |
| G026Y | V050D | N060G | N070D | S076E | Y108R |
| G026L | V050E | N060P | N070E | S076F | Y108L |
| F027H | V050G | N060Q | N070F | S076M | Y108C |
| F027R | V050I | N060S | N070G | S076P | Y108F |
| F027A | V050N | N060T | N070I | S076Q | Y108I |
| F027D | V050Q | N060Y | N070P | S076T | Y108N |
| F027E | V050T | T061N | N070Q | S076Y | Y108S |
| F027G | V050L | T061Q | N070S | S076I | Y108T |
| F027M | I051K | P062G | N070T | S076V | Y108V |
| F027P | I051H | F063H | N070V | Q077H | Y108W |
| F027Q | I051A | F063R | N070Y | Q077R | W109I |
| F027S | I051C | F063L | K071H | Q077L | W109M |
| F027T | I051E | F063A | K071R | Q077A | W109Y |
| F027V | I051G | F063C | K071L | Q077E | G110R |
| F027W | I051N | F063D | K071A | Q077G | G110A |
| F027Y | I051Q | F063G | K071C | Q077I | G110M |
| F027L | I051S | F063M | K071F | Q077M | G110P |
| S028K | I051V | F063N | K071G | Q077N | G110T |
| S028H | I051Y | F063Q | K071Q | Q077S | Q111K |
| S028R | I051L | F063S | K071S | Q077V | Q111H |
| S028A | W052I | F063V | K071T | Q077W | Q111R |
| S028D | W052N | F063P | K071V | Q077Y | Q111L |
| S028I | W052Y | T064R | K071W | Y093H | Q111D |
| S028M | S053H | T064L | K071Y | Y093V | Q111E |
| S028P | S053R | T064C | D072K | Y093W | Q111G |
| S028Q | S053A | T064F | D072H | Y094R | Q111M |
| S028V | S053C | T064G | D072R | Y094L | Q111P |
| S028W | S053G | T064N | D072L | R097H | Q111S |
| S028L | S053I | T064Q | D072A | R097W | Q111T |
| S028C | S053M | T064V | D072G | A098P | Q111W |
| L029K | S053P | S065H | D072I | L099N | Q111Y |
| L029H | S053Q | S065R | D072M | L099W | Q111V |
| L029A | S053L | S065L | D072N | T100H | Q111I |
| L029D | S053T | S065C | D072Q | T100L | G112A |
| L029G | S053V | S065E | D072S | T100A | G112N |
| L029I | S053Y | S065F | D072V | T100D | G112P |
| L029M | G054H | S065G | D072W | T100I | G112S |
| L029N | G054R | S065I | D072Y | T100N | G112T |
| L029S | G054A | S065M | D072P | T100P | G112Y |
| L029V | G054C | S065N | N073H | T100Q | |

[0466] Exemplary of modified anti-EGFR antibodies containing modifications in a variable heavy chain, or portion thereof, provided herein are those that exhibit conditional activity in a tumor environment as described herein above. For example, exemplary antibodies provided herein include those that bind to EGFR (particularly human EGFR) with a higher binding activity under conditions that exist in a tumor microenvironment that include one or both of pH between or about between pH 5.6 to 6.8 or lactate concentration of between or about between 5 mM to 20 mM (e.g. pH 6.0 and/or 16.6 mM lactate) and 10 mg/mL to 50 mg/mL protein (e.g. 20% to 50% human serum), compared to under conditions that exist in a non-tumor microenvironment that include one or both of pH between or about between pH 7.0 to 7.8 or lactate concentration between or about between 0.5 mM to 5 mM (e.g. pH 7.4 and/or 1 mM lactate) and 10 mg/mL to 50 mg/mL protein (e.g. 20% to 50% human serum) of greater than 1.0, such as greater than 1.2, 1.3, 1.4, 1.5, 1.6, 1.7, 1.8, 1.9, 2.0, 3.0, 4.0, 5.0 or greater as described herein above.

[0467] For example, exemplary modified anti-EGFR antibodies that are conditionally active as described herein contain a variable heavy chain having one or more amino acid replacements at a position or positions corresponding to 24, 25, 7, 28, 29, 30, 31, 32, 50, 53, 54, 58, 59, 63, 64, 67, 68, 72, 73, 74, 75, 76, 77, 97, 100, 101, 104, 107, 111 with reference to the heavy chain amino acid positions set forth in any of SEQ ID NO:3. For example, the amino acid positions can be replacements at positions corresponding to replacement of Valine (V) at position 24 (V24), S25, F27, S28, L29, T30, N31, Y32, V50, S53, G54, D58, Y59, F63, T64, L67, S68, D72, N73, S74, K75, S76, Q77, R97, T100, Y101, Y104, A107, Q111 with reference to the amino acid positions set forth in any of SEQ ID NO:3. For example, exemplary anti-EGFR antibodies provided herein contain one or more amino acid replacements corresponding to heavy chain replacement or replacements V24I, V24L, V24E, S25C, S25G, S25I, S25M, S25V, S25Q, S25T, S25L, S25H, S25R, S25A, S25D, F27R, S28C, L29H, T30F, N31H, N31I, N31T, N31V, Y32T, V50L, S53G, G54D, G54S,

[0468] G54R, G54C, G54P, D58M, Y59E, F63R, F63C, F63G, F63M, F63V, F63P, F63S, T64N, T64V, L67G, S68F, S68Q, D72K, D72L, D72P, D72M, D72W, N73Q, S74H, S74R, S74D, S74G, S74Y, K75H, K75G, K75W, K75P, S76I, S76V, Q77R, Q77E, R97H, T100I, T100P, Y101W, Y104D, Y104F, Y104S, Y105V, A107N, Q111I, Q111P, Q111V.

[0469] In particular examples, exemplary modifications provided herein include modification of a heavy chain of an anti-EGFR antibody at positions corresponding to positions 24, 25, 27, 30, 53, 72, 97, 104 and 111 with reference to the amino acid positions set forth in SEQ ID NO:3. For example, the amino acid positions can be replacements at positions corresponding to replacement of Valine (V) at position 24 (V24), S25, F27, T30, S53, D72, R97, Y104 or Q111 with reference to the amino acid positions set forth in SEQ ID NO:3. Exemplary of amino acid replacements in the modified anti-EGFR antibodies provided herein, include but are not limited to, replacement of a heavy chain residue with: glutamic acid (E) at a position corresponding to 24; C at a position corresponding to 25; V at a position corresponding to position 25; R at a position corresponding to 27; F at a position corresponding to position 30; G at a position corresponding to position 53; L at a position corresponding to position 72; H at a position corresponding to 97; D at a position corresponding to 104 or P at a position corresponding to 111. For example, the anti-EGFR antibodies provided herein contain one or more amino acid replacements corresponding to heavy chain replacements of V24E, S25C, S25V, F27R, T30F, S53G, D72L, R97H, Y104D or Q111P with reference to the sequence of amino acids set forth in SEQ ID NO:3. The anti-EGFR antibody, or antigen-binding fragment thereof, can contain only a single amino acid replacement in the variable heavy chain. Typically, the anti-EGFR antibody, or antigen-binding fragment thereof, contains at least two or more of the above amino acid replacements in the variable heavy chain, such as at least 2, 3, 4, 5, 6, 7, 8 or 9 amino acid replacements from among V24E, S25C, S25V, F27R, T30F, S53G, D72L, R97H, Y104D or Q111P with reference to the sequence of amino acids set forth in SEQ ID NO:3. The anti-EGFR, or antigen-binding fragments thereof, can contain additional modifications in the heavy chain, for example as described below in subsection 3, or as a result of humanization of the antibody as described herein. In particular, provided herein is a modified anti-EGFR antibody, or antigen-binding fragment thereof that contains an amino acid replacement of heavy chain residue Y104, such as amino acid replacement Y104D, Y104F or Y104S.

[0470] Non-limiting amino acid replacements in a heavy chain are set forth in Table 6 with reference to numbering set forth in SEQ ID NO:3. An exemplary SEQ ID NO of a variable heavy chain containing the amino acid replacement is set forth. For any of the amino acid replacements in a variable heavy chain provided herein above, it is understood that the replacements can be made in the corresponding position in another anti-EGFR antibody by alignment therewith with the sequence set forth in SEQ ID NO:3 (see e.g. FIG. 2), whereby the corresponding position is the aligned position. Hence, the antibody can contain a heavy chain constant region, or portion thereof. In particular examples, the amino acid replacement(s) can be at the corresponding position in a cetuximab heavy chain, or portion thereof, such as set forth in any of SEQ ID NOS:1, 3, 5, 8 or 28 or a variant thereof having at least 75%, 80%, 81%, 82%, 83%, 84%, 85%, 86%, 86%, 88%, 89%, 90%, 91%, 92%, 93%, 94%, 95%, 96%, 97%, 98%, 99% or more sequence identity thereto, so long as the resulting modified antibody containing the modified variable heavy chain, or portion thereof, exhibits a ratio of binding activity under conditions that exist in a tumor microenvironment that include one or both of pH between or about between pH 5.6 to 6.8 or lactate concentration of between or about between 5 mM to 20 mM (e.g. pH 6.0 and/or 16.6 mM lactate) and 10 mg/mL to 50 mg/mL protein (e.g. 20% to 50% human serum), compared to under conditions that exist in a non-tumor microenvironment that include one or both of pH between or about between pH 7.0 to 7.8 or lactate concentration between or about between 0.5 mM to 5 mM (e.g. pH 7.4 and/or 1 mM lactate) and 10 mg/mL to 50 mg/mL protein (e.g. 20% to 50% human serum) of greater than 1.0 as described herein above.

TABLE 6
Exemplary Heavy Chain Amino Acid Replacements

| Amino Acid Replacements | SEQ ID NO |
|---|---|
| HC-Y104D/HC-Q111P | 1062 |
| HC-S25C/HC-Y104D | 1112 |
| HC-S53G/HC-Y104D | 1114 |
| HC-S53G/HC-Y104D/HC-Q111P | 1115 |
| HC-S25V/HC-Y104D | 1116 |
| HC-S25V/HC-Y104D/HC-Q111P | 1117 |
| HC-S25V/HC-S53G/HC-Y104D | 1118 |
| HC-S25V/HC-S53G/HC-Y104D/HC-Q111P | 1119 |
| HC-T30F/HC-Y104D | 1124 |
| HC-T30F/HC-Y104D/HC-Q111P | 1125 |
| HC-T30F/HC-S53G/HC-Y104D | 1126 |
| HC-T30F/HC-S53G/HC-Y104D/HC-Q111P | 1127 |
| HC-D72L/HC-Y104D | 1128 |
| HC-D72L/HC-Y104D/HC-Q111P | 1129 |
| HC-S53G/HC-D72L/HC-Y104D | 1130 |
| HC-S53G/HC-D72L/HC-Y104D/HC-Q111P | 1131 |
| HC-S25C/HC-Q111P | 1113 |
| HC-V24E/HC-F27R/HC-R97H/HC-Q111P | 1093 |

[0471] b. Light Chain Modifications

[0472] Provided herein are modified anti-EGFR antibodies containing a modification(s), such as amino acid replacement, in a variable light chain of a cetuximab antibody, antigen-binding fragment thereof or variant thereof, corresponding to amino acid residue(s) in a cetuximab antibody containing a variable light chain set forth in SEQ ID NO:4. The resulting modification(s) can be in a light chain set forth in SEQ ID NO: 2, 4, 9, 10 or 29, or in a variant thereof, having at least 75%, 80%, 81%, 82%, 83%, 84%, 85%, 86%, 86%, 88%, 89%, 90%, 91%, 92%, 93%, 94%, 95%, 96%, 97%, 98%, 99% or more sequence identity thereto. The modifications can be in a complementarity determining region (CDR) or in a framework region.

[0473] For example, provided herein are modified anti-EGFR antibodies containing a at least one amino acid replacement or substitution in the variable light chain, or a portion thereof, at any of positions corresponding to 1, 2, 3, 4, 5, 24, 25, 26, 27, 28, 29, 30, 31, 32, 33, 48, 49, 51, 52, 53, 54, 55, 56, 86, 87, 89, 91, 92, 93, 96, 97, 98, 99 or 100 with reference to the amino acid positions set forth in SEQ ID NO:4. For example, the amino acid positions can be replacements at positions corresponding to replacement of Aspartic Acid (D) at position 1 (D1), I2, L3, L4, T5, R24, A25, S26, Q27, S28, 129, G30, T31, N32, I33, I48, K49, A51, S52, E53, S54, I55, S56, Y86, Y87, Q89, N91, N92, N93, T96, T97, F98, G99 or A100 with reference to the amino acid positions set forth in SEQ ID NO:4. With respect to Kabat numbering, exemplary positions in the light chain that can be modified, for example by amino acid replacement or substitution, include, but are not limited to, any of positions corresponding to positions 1, 2, 3, 4, 5, 24, 25, 26, 27, 28, 29, 30, 31, 32, 33, 48, 49, 51, 52, 53, 54, 55, 56, 86, 87, 89, 91, 92, 93, 96, 97, 98, 99 or 100. In some examples, the amino acid residue that is modified (e.g. replaced) at the position corresponding to any of the above positions is a conservative residue or a semi-conservative amino acid residue to the amino acid set forth in any of SEQ ID NOS:2, 4, 9, 10 or 29.

TABLE 7
Exemplary light chain amino acid replacements

| | | | | | |
|---|---|---|---|---|---|
| D001W | R024M | G030A | K049V | Y087D | T097D |
| I002C | R024S | G030E | K049Y | Y087F | T097G |
| I002V | R024W | G030F | K049L | Y087G | T097Q |
| I002W | R024Y | G030I | K049H | Y087I | T097S |
| L003D | R024G | G030M | K049R | Y087N | T097V |
| L003F | A025C | G030P | A051T | Y087P | T097K |
| L003G | A025G | G030Q | A051L | Y087S | T097R |
| L003S | A025L | G030S | S052A | Y087T | F098A |
| L003T | A025V | G030V | S052C | Y087V | F098M |
| L003V | S026A | G030Y | S052D | Y087W | F098S |
| L003W | S026C | G030L | S052E | Y087K | F098V |
| L003Y | S026D | G030K | S052G | Y087H | F098Y |
| L003R | S026I | G030H | S052I | Y087R | G099L |
| L004C | S026M | G030R | S052M | Q089E | G099D |
| L004E | S026N | T031A | S052Q | N091L | G099E |
| L004F | S026V | T031F | S052V | N091A | G099F |
| L004I | S026W | T031G | S052W | N091C | G099I |
| L004P | S026L | T031M | S052R | N091I | G099M |
| L004S | S026G | T031S | S052K | N091M | G099N |
| L004T | S026H | T031V | E053G | N091S | G099S |
| L004V | S026R | T031W | S054M | N091T | G099T |
| L004W | Q027A | T031L | I055A | N091V | G099V |
| L004K | Q027D | T031K | I055F | N091H | G099K |
| L004H | Q027E | T031H | S056G | N091R | G099H |
| L004R | Q027F | N032G | S056L | N092C | Q100C |
| T005A | Q027I | I033F | S056A | N092D | Q100D |
| T005C | Q027M | I033G | S056C | N092L | Q100E |
| T005D | Q027N | I033M | S056D | N092M | Q100F |
| T005E | Q027P | I033T | S056E | N092S | Q100I |
| T005F | Q027T | I033V | S056F | N092T | Q100M |
| T005G | S028A | I033H | S056N | N092V | Q100N |
| T005N | S028D | I048M | S056P | N092W | Q100P |
| T005S | S028N | I048S | S056Q | N092Y | Q100T |
| T005W | S028Q | I048L | S056V | N092H | Q100V |
| T005L | S028L | I048K | S056W | N092K | Q100W |
| T005K | S028K | K049A | S056H | N092R | Q100Y |
| T005H | S028H | K049E | S056R | N093T | Q100K |
| T005R | I029A | K049F | S056K | T096L | Q100H |
| T005P | I029E | K049G | Y086F | T096C | Q100R |
| R024A | I029F | K049N | Y086M | T096M | |
| R024C | I029S | K049Q | Y086H | T096V | |
| R024F | I029T | K049S | Y087L | T097L | |
| R024L | I029R | K049T | Y087C | T097A | |

[0474] In one example, provided herein are modified anti-EGFR antibodies containing a variable light chain having a modification in a CDR, such as, for example, CDRL1, CDRL2 or CDRL3. For example, provided herein are modified anti-EGFR antibodies containing one or more amino acid replacements in a light chain CDR1 at any of positions corresponding to positions 24, 25, 26, 27, 28, 29, 30, 31, 32 or 33 with reference to the amino acid positions set forth in SEQ ID NO:4; CDR2 at any of positions corresponding to positions 51, 52, 53, 54, 55 or 56 with reference to the amino acid positions set forth in SEQ ID NO:4; CDR3 at any of positions corresponding to positions 89, 91, 92, 93, 96 or 97 with reference to the amino acid positions set forth in SEQ ID NO:4.

[0475] In other examples, provided herein are modified anti-EGFR antibodies containing a variable light chain containing a modification in a framework region (FW), for example, light chain FW1, FW2, FW3 or FW4. For example, provided herein are modified anti-EGFR antibodies containing one or more amino acid replacements in a light chain FW1 at any of positions corresponding to positions 1, 2, 3, 4 or 5 with reference to the amino acid positions set forth in SEQ ID NO:4; FW2 at any of positions corresponding to positions 48 or 49 with reference to the amino acid positions set forth in SEQ ID NO:4; FW3 at any of positions corresponding to positions 86 or 87 with reference to the amino acid positions set forth in SEQ ID NO:4; and FW4 at any of positions corresponding to positions 98, 99 or 100 with reference to the amino acid positions set forth in SEQ ID NO:4.

[0476] Provided herein are modified anti-EGFR antibodies containing at least one amino acid replacement in a variable light chain, or portion thereof, corresponding to any set forth in Table 7 with reference to a position set forth in SEQ ID NO:4.

[0477] Exemplary of modified anti-EGFR antibodies containing modifications in a variable light chain, or portion thereof, provided herein are those that exhibit conditional activity in a tumor environment as described herein above For example, exemplary antibodies provided herein include those that bind to EGFR (particularly human EGFR) with a higher binding activity under conditions that exist in a tumor microenvironment that include one or both of pH between or about between pH 5.6 to 6.8 or lactate concentration of between or about between 5 mM to 20 mM (e.g. pH 6.0 and/or 16.6 mM lactate) and 10 mg/mL to 50 mg/mL protein (e.g. 20% to 50% human serum), compared to under conditions that exist in a non-tumor microenvironment that include one or both of pH between or about between pH 7.0 to 7.8 or lactate concentration between or about between 0.5 mM to 5 mM (e.g. pH 7.4 and/or 1 mM lactate) and 10 mg/mL to 50 mg/mL protein (e.g. 20% to 50% human serum) of greater than 1.0, such as greater than 1.2, 1.3, 1.4, 1.5, 1.6, 1.7, 1.8, 1.9, 2.0, 3.0, 4.0, 5.0 or greater as described herein above.

[0478] For example, exemplary modified anti-EGFR antibodies that are conditionally active as described herein contain a variable light chain having one or more amino acid replacements at a position or positions corresponding to 4, 5, 24, 29, 56 or 91 with reference to the light chain amino acid positions set forth in any of SEQ ID NO:4. For example, the amino acid positions can be replacements at positions corresponding to replacement of Leucine (L) at position 4 (L4), T5, R24, I29, S56 or N91 with reference to the amino acid positions set forth in SEQ ID NO:4. For example, exemplary anti-EGFR antibodies provided herein contain one or more amino acid replacements corresponding to light chain replacement or replacements L4C, L4F, L4V, T5P, R24G, I29S, S56H or N91V. The anti-EGFR antibody, or antigen-binding fragment thereof, can contain only a single amino acid replacement in the variable light chain. Typically, the anti-EGFR antibody, or antigen-binding fragment thereof, contains at least two or more of the above amino acid replacements in the variable light chain, such as at least 2, 3, 4, 5 or 6 amino acid replacements from among L4C, L4F, L4V, TSP, R24G, I29S, S56H or N91V with reference to the sequence of amino acids set forth in SEQ ID NO:4. The anti-EGFR, or antigen-binding fragments thereof, can contain additional modification in the light chain, for example as described below in subsection 3, or as a result of humanization of the antibody as described herein.

[0479] In particular examples, exemplary modifications provided herein include modification of a light chain of an anti-EGFR antibody at position corresponding to positions 29 with reference to the amino acid positions set forth in SEQ ID NO:4. For example, the amino acid positions can be replacements at positions corresponding to replacement of Isoleucine (I) at position 29 (129) with reference to the amino acid positions set forth in SEQ ID NO:4. Exemplary of amino acid replacements in the modified anti-EGFR antibodies provided herein, include but are not limited to, replacement of a light chain residue with: serine (S) at a position corresponding to 29. For example, the anti-EGFR antibodies provided herein contain an amino acid replacement corresponding to light chain replacement of I29S in a sequence of amino acids set forth in SEQ ID NO:4.

[0480] Any of the modification(s) in a heavy chain as described above and any of the modification(s) in a light chain as described herein can be combined in an anti-EGFR antibody, or antigen-binding fragment thereof. Non-limiting examples of such modification(s) include HC-Y104D/LC-I29S; HC-Y104D/HC-Q111P/LC-I29S; HC-S25C/LC-I29S; or HC-Q111P/LC-I29S.

[0481] For any of the amino acid replacements in a variable light chain provided herein above, it is understood that the replacements can be made in the corresponding position in another anti-EGFR antibody by alignment therewith with the sequence set forth in SEQ ID NO:4 (see e.g. FIG. 2), whereby the corresponding position is the aligned position. In particular examples, the amino acid replacement(s) can be at the corresponding position in a cetuximab light chain set forth in any of SEQ ID NOS:2, 4, 9, 10 or 29, or a variant thereof having at least 75%, 80%, 81%, 82%, 83%, 84%, 85%, 86%, 86%, 88%, 89%, 90%, 91%, 92%, 93%, 94%, 95%, 96%, 97%, 98%, 99% or more sequence identity thereto, so long as the resulting modified antibody containing the modified variable light chain exhibits a ratio of binding activity under conditions that exist in a tumor microenvironment that include one or both of pH between or about between pH 5.6 to 6.8 or lactate concentration of between or about between 5 mM to 20 mM (e.g. pH 6.0 and/or 16.6 mM lactate) and 10 mg/mL to 50 mg/mL protein (e.g. 20% to 50% human serum), compared to under conditions that exist in a non-tumor microenvironment that include one or both of pH between or about between pH 7.0 to 7.8 or lactate concentration between or about between 0.5 mM to 5 mM (e.g. pH 7.4 and/or 1 mM lactate) and 10 mg/mL to 50 mg/mL protein (e.g. 20% to 50% human serum) of greater than 1.0 as described herein above.

[0482] c. Exemplary Modified Anti-EGFR Antibodies and Fragments Thereof

[0483] Modified anti-EGFR antibodies provided herein, such as any described herein above, minimally contain a modified variable heavy chain and/or modified variable light chain, or portion thereof sufficient to bind antigen when assembled into an antibody, as described herein above. Provided herein are modified anti-EGFR antibodies containing a modified variable heavy chain set forth in any of SEQ ID NOS:30-557, 1062-1064, 1093, 1098-1107 or 1112-1131, or a sequence that exhibits at least 75%, 80%, 81%, 82%, 83%, 84%, 85%, 86%, 86%, 88%, 89%, 90%, 91%, 92%, 93%, 94%, 95%, 96%, 97%, 98%, 99% or more sequence identity to any of SEQ ID NOS: 30-557, 1062-1064, 1093, 1098-1107 or 1112-1131; and a variable light chain set forth in SEQ ID NO:4 or 10. In other examples, provided herein are modified anti-EGFR antibodies containing a variable heavy chain set forth in SEQ ID NO: 3; and a variable light chain set forth in any of SEQ ID NOS:558-1061 or 1065-1068, or a sequence that exhibits at least 75%, 80%, 81%, 82%, 83%, 84%, 85%, 86%, 86%, 88%, 89%, 90%, 91%, 92%, 93%, 94%, 95%, 96%, 97%, 98%, 99% or more sequence identity to any of SEQ ID NOS: 558-1061 or 1065-1068.

[0484] In some examples, provided herein are modified anti-EGFR antibodies containing modifications in both the variable heavy chain and variable light chain, whereby the anti-EGFR antibody contains a modified variable heavy chain set forth in any of SEQ ID NOS: 30-557, 1062-1064, 1093, 1098-1107 or 1112-1131, or a sequence that at least 75%, 80%, 81%, 82%, 83%, 84%, 85%, 86%, 86%, 88%, 89%, 90%, 91%, 92%, 93%, 94%, 95%, 96%, 97%, 98%, 99% or more sequence identity to any of SEQ ID NOS: 30-557, 1062-1064, 1093, 1098-1107 or 1112-1131; and a variable light chain set forth in any of SEQ ID NOS:558-1061 or 1065-1068, or a sequence that exhibits at least 75%, 80%, 81%, 82%, 83%, 84%, 85%, 86%, 86%, 88%, 89%, 90%, 91%, 92%, 93%, 94%, 95%, 96%, 97%, 98%, 99% or more sequence identity to any of SEQ ID NOS:558-1061 or 1065-1068. In particular examples, provided herein is a modified anti-EGFR containing a modified variable heavy chain set forth in SEQ ID NO:495, or a sequence that exhibits at least 75%, 80%, 81%, 82%, 83%, 84%, 85%, 86%, 86%, 88%, 89%, 90%, 91%, 92%, 93%, 94%, 95%, 96%, 97%, 98%, 99% to SEQ ID NO:495 and a modified variable light chain set forth in SEQ ID NO:639 or SEQ ID NO: 891 or a sequence that exhibits at least 75%, 80%, 81%, 82%, 83%, 84%, 85%, 86%, 86%, 88%, 89%, 90%, 91%, 92%, 93%, 94%, 95%, 96%, 97%, 98%, 99% or more sequence identity to SEQ ID NO: 639 or 891 (designated HC-Y104D/LC-I29S). In another example, provided herein is a modified anti-EGFR containing a modified variable heavy chain set forth in SEQ ID NO:1062, or a sequence that exhibits at least 75%, 80%, 81%, 82%, 83%, 84%, 85%, 86%, 86%, 88%, 89%, 90%, 91%, 92%, 93%, 94%, 95%, 96%, 97%, 98%, 99% to SEQ ID NO:1062 and a modified variable light chain set forth in SEQ ID NO:639 or SEQ ID NO: 891 or a sequence that exhibits at least 75%, 80%, 81%, 82%, 83%, 84%, 85%, 86%, 86%, 88%, 89%, 90%, 91%, 92%, 93%, 94%, 95%, 96%, 97%, 98%, 99% or more sequence identity to SEQ ID NO: 639 or 891 (designated HC-Y104D/HC-Q111P/LC-I29S). In a further example, provided herein is a modified anti-EGFR containing a modified variable heavy chain set forth in SEQ ID NO:58, or a sequence that exhibits at least 75%, 80%, 81%, 82%, 83%, 84%, 85%, 86%, 86%, 88%, 89%, 90%, 91%, 92%, 93%, 94%, 95%, 96%, 97%, 98%, 99% to SEQ ID NO:58 and a modified variable light chain set forth in SEQ ID NO:639 or SEQ ID NO: 891 or a sequence that exhibits at least 75%, 80%, 81%, 82%, 83%, 84%, 85%, 86%, 86%, 88%, 89%, 90%, 91%, 92%, 93%, 94%, 95%, 96%, 97%, 98%, 99% or more sequence identity to SEQ ID NO: 639 or 891 (designated HC-S25C/LC-I29S). In another example, provided herein is a modified anti-EGFR containing a modified variable heavy chain set forth in SEQ ID NO:547, or a sequence that exhibits at least 75%, 80%, 81%, 82%, 83%, 84%, 85%, 86%, 86%, 88%, 89%, 90%, 91%, 92%, 93%, 94%, 95%, 96%, 97%, 98%, 99% to SEQ ID NO:547 and a modified variable light chain set forth in SEQ ID NO:639 or SEQ ID NO: 891 or a sequence that exhibits at least 75%, 80%, 81%, 82%, 83%, 84%, 85%, 86%, 86%, 88%, 89%, 90%, 91%, 92%, 93%, 94%, 95%, 96%, 97%, 98%, 99% or more sequence identity to SEQ ID NO: 639 or 891 (designated HC-Q111P/LC-I29S).

[0485] In particular, provided herein is a modified anti-EGFR containing a variable heavy chain set forth in SEQ ID NOS:495, 1062, 1112, 1114-1119, 1124-1131 or a sequence that exhibits at least 75%, 80%, 81%, 82%, 83%, 84%, 85%, 86%, 86%, 88%, 89%, 90%, 91%, 92%, 93%, 94%, 95%, 96%, 97%, 98%, 99% or more sequence identity to any of SEQ ID NOS: 495, 1062, 1112, 1114-1119, 1124-1131; and a variable light chain set forth in SEQ ID NOS:4 or 10.

[0486] The antibodies provided herein can be full-length IgG1 antibodies, or other subtype from among IgG2, IgG3 or IgG4. For example, the anti-EGFR antibodies can be full-length IgG1 antibodies containing a kappa light chain constant region from cetuximab (set forth in SEQ ID NO:1071) or an IgG1 heavy chain constant region from cetuximab (set forth in SEQ ID NO:1069). The heavy chain constant region also can be a human IgG1 heavy chain set forth in SEQ ID NO:22, from an Ig classes, such as IgG2 (set forth in SEQ ID NO:23), IgG3 (set forth in SEQ ID NO:24) or IgG4 (set forth in SEQ ID NO:25), or can be a modified IgG1 heavy chain constant region set forth in SEQ ID NO:26, 27 or 1070. The light chain constant region also can be a human kappa light chain (set forth in SEQ ID NO:1072) or a human lambda light chain (set forth in SEQ ID NO:1073).

[0487] For example, the heavy chain of modified anti-EGFR antibodies provided herein can contain a modified variable heavy chain described herein above and an IgG1 heavy chain set forth in SEQ ID NO:1069. In another example, the heavy chain of modified anti-EGFR antibodies provided herein can contain a modified variable heavy chain described herein above and an IgG1 heavy chain set forth in SEQ ID NO:22. In yet another example, the heavy chain of modified anti-EGFR antibodies provided herein can contain a modified variable heavy chain described herein above and an IgG1 heavy chain set forth in SEQ ID NO:1070. In one example, the light chain of modified anti-EGFR antibodies provided herein can contain a modified variable light chain described herein above and a kappa light chain set forth in SEQ ID NO:1071. In another example, the light chain of modified anti-EGFR antibodies provided herein can contain a modified variable light chain described herein above and a kappa light chain set forth in SEQ ID NO:1072.

[0488] For example, provided herein are modified anti-EGFR antibodies containing a variable heavy chain set forth in any of SEQ ID NOS: 30-557, 1062-1064, 1093, 1098-1107 or 1112-1131, or a sequence that exhibits at least 75%, 80%, 81%, 82%, 83%, 84%, 85%, 86%, 86%, 88%, 89%, 90%, 91%, 92%, 93%, 94%, 95%, 96%, 97%, 98%, 99% or more sequence identity to any of SEQ ID NOS: 30-557, 1062-1064, 1093, 1098-1107 or 1112-1131, further containing a sequence of amino acids corresponding to an IgG1 constant region set forth in any of SEQ ID NOS:22, 1069 or 1070; and a light chain set forth in SEQ ID NO:2 or 9. In some examples, provided herein are modified anti-EGFR antibodies containing a variable heavy chain set forth in any of SEQ ID NOS:1 or 8; and a light chain set forth in any of SEQ ID NOS:558-1061 or 1065-1068, or a sequence that exhibits at least 75%, 80%, 81%, 82%, 83%, 84%, 85%, 86%, 86%, 88%, 89%, 90%, 91%, 92%, 93%, 94%, 95%, 96%, 97%, 98%, 99% or more sequence identity to any of SEQ ID NOS: 558-1061 or 1065-1068, further containing a sequence of amino acids corresponding to a kappa light chain constant region set forth in SEQ ID NO:1071 or 1072.

[0489] Modified anti-EGFR antibodies provided herein also include antibody fragments, which are derivatives of full-length antibody that contain less than the full sequence of the full-length antibodies but retain at least a portion of the specific binding abilities of the full-length antibody, for example the variable portions of the heavy and light chain. The antibody fragments also can include antigen-binding portions of an antibody that can be inserted into an antibody framework (e.g., chimeric antibodies) in order to retain the binding affinity of the parent antibody. Examples of antibody fragments include, but are not limited to, Fab, Fab′, F(ab′)₂, single-chain Fv (scFv), Fv, dsFv, diabody, Fd and Fd′ fragments, and other fragments, including modified fragments (see, for example, Methods in Molecular Biology, Vol. 207: Recombinant Antibodies for Cancer Therapy Methods and Protocols (2003); Chapter 1; p 3-25, Kipriyanov). Antibody fragments can include multiple chains linked together, such as by disulfide bridges and can be produced recombinantly. Antibody fragments also can contain synthetic linkers, such as peptide linkers, to link two or more domains. Methods for generating antigen-binding fragments are well-known in the art and can be used to modify any antibody provided herein. Fragments of antibody molecules can be generated, such as for example, by enzymatic cleavage. For example, upon protease cleavage by papain, a dimer of the heavy chain constant regions, the Fc domain, is cleaved from the two Fab regions (i.e. the portions containing the variable regions).

[0490] Single chain antibodies can be recombinantly engineered by joining a heavy chain variable region (V_{H}) and light chain variable region (V_{L}) of a specific antibody. The particular nucleic acid sequences for the variable regions can be cloned by standard molecular biology methods, such as, for example, by polymerase chain reaction (PCR) and other recombination nucleic acid technologies. Methods for producing scFvs are described, for example, by Whitlow and Filpula (1991) Methods, 2: 97-105; Bird et al. (1988) Science 242:423-426; Pack et al. (1993) Bio/Technology 11:1271-77; and U.S. Pat. Nos. 4,946,778, 5,840,300, 5,667,988, 5,658,727, 5,258,498).

[0491] Fragments of modified anti-EGFR antibodies provided herein, such as any described herein above, minimally contain a modified variable heavy chain and/or modified variable light chain as described herein above. Also provided are antigen-binding fragments of any of the above antibodies containing a modified variable heavy chain set forth in any of SEQ ID NOS: 30-557, 1062-1064, 1093, 1098-1107 or 1112-1131, and/or a modified variable light chain set forth in any of SEQ ID NOS:558-1061 or 1065-1068, or variable chains having a sequence identity of at least 75%, 80%, 81%, 82%, 83%, 84%, 85%, 86%, 86%, 88%, 89%, 90%, 91%, 92%, 93%, 94%, 95%, 96%, 97%, 98%, 99% or more to any of SEQ ID NOS: 30-1068, 1093 or 1098-1131. For example, examples of antibody fragments include, but are not limited to, Fab, Fab′, F(ab′)₂, single-chain Fv (scFv), Fv, dsFv, diabody, Fd and Fd′ fragments.

[0492] For example, such anti-EGFR antibodies can be Fab fragments further containing a heavy chain C_{H} 1 constant region from cetuximab (set forth in SEQ ID NO:11) or a kappa light chain constant region from cetuximab (set forth in SEQ ID NO:1071). The heavy chain C_{H}1 constant region can also be a human IgG1 C_{H} 1 constant region set forth in SEQ ID NO:1108. In one example, the heavy chain of modified anti-EGFR antibodies provided herein can contain a modified variable heavy chain described herein above, such as any set forth in SEQ ID NOS: 30-557, 1062-1064, 1093, 1098-1107 or 1112-1131, and a C_{H}1 heavy chain domain set forth in SEQ ID NO:11. In another example, the heavy chain of modified anti-EGFR antibodies provided herein can contain a modified variable heavy chain described herein above, such as any set forth in SEQ ID NOS: 30-557, 1062-1064, 1093, 1098-1107 or 1112-1131, and a C_{H}1 heavy chain domain set forth in SEQ ID NO:1108. In one example, the light chain of modified anti-EGFR antibodies provided herein can contain a modified variable light chain described herein above, such as any set forth in SEQ ID NOS:558-1061 or 1065-1068. and a kappa light chain set forth in SEQ ID NO:1071. In another example, the light chain of modified anti-EGFR antibodies provided herein can contain a modified variable light chain described herein above, such as any set forth in SEQ ID NOS:558-1061 or 1065-1068, and a kappa light chain set forth in SEQ ID NO:1072.

[0493] In particular examples, the modified anti-EGFR antibody is a single chain antibody. A single chain antibody can be generated from the antigen-binding domain of any of the anti-EGFR antibodies provided herein. Methods for generating single chain antibodies using recombinant techniques are known in the art, such as those described in, for example, Marasco et al. (1993) Proc. Natl. Acad. Sci. USA 90:7889-7893, Whitlow and Filpula (1991) Methods, 2: 97-105; Bird et al. (1988) Science 242:423-426; Pack et al. (1993) Bio/Technology 11:1271-77; and U.S. Pat. Nos. 4,946,778, 5,840,300, 5,667,988, 5,658,727.

[0494] A single chain antibody can contain a light chain variable (V_{L}) domain or functional region thereof and a heavy chain variable (V_{H}) domain or functional region thereof of any anti-EGFR antibody or antigen-binding fragment thereof provided herein. In some examples, the V_{L} domain or functional region thereof of the single chain antibody contains a complementarity determining region 1 (CDR1), a complementarity determining region 2 (CDR2) and/or a complementarity determining region 3 (CDR3) of an anti-EGFR antibody or antigen-binding fragment thereof provided herein. In some examples, the V_{H} domain or functional region thereof of the single chain antibody contains a complementarity determining region 1 (CDR1), a complementarity determining region 2 (CDR2) and a complementarity determining region 3 (CDR3) of any anti-EGFR antibody or antigen-binding fragment thereof provided herein. In some examples, the single chain antibody further contains a peptide linker. In such examples, a peptide linker can be located between the light chain variable domain (V_{L}) and the heavy chain variable domain (V_{H}).

[0495] The single chain antibody can contain a peptide spacer, or linker, between the one or more domains of the antibody. For example, the light chain variable domain (V_{L}) of an antibody can be coupled to a heavy chain variable domain (V_{H}) via a flexible linker peptide. Various peptide linkers are well-known in the art and can be employed in the provided methods. A peptide linker can include a series of glycine residues (Gly) or Serine (Ser) residues. Exemplary of polypeptide linkers are peptides having the amino acid sequences (Gly-Ser)ₙ, (GlyₘSer)ₙ or (SerₘGly)ₙ, in which m is 1 to 6, generally 1 to 4, and typically 2 to 4, and n is 1 to 30, or 1 to 10, and typically 1 to 4, with some glutamic acid (Glu) or lysine (Lys) residues dispersed throughout to increase solubility (see, e.g., International PCT application No. WO 96/06641, which provides exemplary linkers for use in conjugates). Exemplary peptide linkers include, but are not limited to peptides having the sequence (Gly₄Ser)₃ (SEQ ID NO:21), GGSSRSSSSGGGGSGGGG (SEQ ID NO: 1074), GSGRSGGGGSGGGGS (SEQ ID NO: 1075), EGKSSGSGSESKST (SEQ ID NO: 1076), EGKSSGSGSESKSTQ (SEQ ID NO: 1077), EGKSSGSGSESKVD (SEQ ID NO: 1078), GSTSGSGKSSEGKG (SEQ ID NO: 1079), KESGSVSSEQLAQFRSLD (SEQ ID NO: 1080), and ESGSVSSEELAFRSLD (SEQ ID NO: 1081). Generally, the linker peptides are approximately 1-50 amino acids in length. The linkers used herein also can increase intracellular availability, serum stability, specificity and solubility or provide increased flexibility or relieve steric hindrance. Linking moieties are described, for example, in Huston et al. (1988) Proc Natl Acad Sci USA 85:5879-5883, Whitlow et al. (1993) Protein Engineering 6:989-995, and Newton et al., (1996) Biochemistry 35:545-553. Other suitable peptide linkers include any of those described in U.S. Pat. No. 4,751,180 or 4,935,233, which are hereby incorporated by reference.

[0496] 2. Humanized Anti-EGFR Antibodies

[0497] Provided herein are human or humanized anti-EGFR antibodies. For example, any known anti-EGFR antibody, or antigen-binding fragment thereof, such as any modified anti-EGFR containing a modified heavy chain and/or modified light chain as provided in subsection 1 above, can be humanized. Methods of humanization are well known to the skilled artisan. Antibody humanization can be used to evolve mouse or other non-human antibodies into human antibodies. The resulting antibody contains an increased in human sequence and decrease to no mouse or non-human antibody sequence, while maintaining similar binding affinity and specificity as the starting antibody.

[0498] Methods for engineering or humanizing non-human or human antibodies can be used and are well known in the art. Generally, a humanized or engineered antibody has one or more amino acid residues from a source which is non-human, e.g., but not limited to mouse, rat, rabbit, non-human primate or other mammal. The human amino acid residues are imported thereto, and hence are often referred to as “import” residues, which are typically taken from an “import” variable, constant or other domain of a known human sequence. Known human Ig sequences are disclosed, e.g., ncbi.nlm.nih.gov/entrez/query.fcgi; atcc.org/phage/hdb.html; sciquest.com/; www.abcam.com/; antibodyresource.com/onlinecomp.html; public.iastate.eduLabout.pedro/research_tools.html; mgen.uni-heidelberg.de/SD/IT/IT.html; whfreeman.com/immunology/CH05/kuby05.htm; library.thinkquest.org/12429/Immune/Antibody.html; hhmi.org/grants/lectures/1996/vlaW; path.cam.ac.uk/.about.mrc7/mikeimages.html; antibodyresource.com/; mcb.harvard.edu/BioLinks/Immunology.html. immunologylink.com/; pathbox.wustl.edul.about.hcenter/index.html; biotech.ufl.edu/.about.hcl/; www.pebio.com/pa/340913/340913.html; nal.usda.gov/awic/pubs/antibody/; m.ehime-u.ac.jp/.about.yasuhito/Elisa.html; biodesign.com/table.asp; icnet.uk/axp/facs/davies/links.html; biotech.ufl.edu/.about.fccl/protocol.html; isac-net.org/sites_geo.html; aximtl.imt.uni-marburg.de/.about.rek/AEPStart.html; baserv.uci.kun.nl/.about.jraats/links1.html; recab.uni-hd.de/immuno.bme.nwvu.edu/; mrc-cpe.cam.ac.uk/imt-doc/public/INTRO.html; ibt.unam.mx/vir/V_mice.html; imgt.cnusc.fr:8104/; biochem.ucl.ac.uk/.about.martin/abs/index.html; antibody.bath.ac.uk/; abgen.cvm.tamu.edu/lab/wwwabgen.html; unizh.chiabout.honegger/AHOseminar/Slide01.html; www.cryst.bbk.ac.uk/.about.ubcg07s/; nimr.mrc.ac.uk/CC/ccaewg/ccaewg.htm; path.cam.ac.uk/.about.mrc7/humanisation/TAHHP.html; ibt.unam.mx/vir/structure/stat_aim.html; biosci.missouri.edu/smithgp/index.html; cryst.bioc.cam.ac.uk/.about.fmolina/Web-pages/Pept/spottech.html; jerini.de/fr_products.htm; patents.ibm.con/ibm.html. Kabat et al. Sequences of Proteins of Immunological Interest, U.S. Dept. Health (1983).

[0499] Such imported sequences can be used to reduce immunogenicity or reduce, enhance or modify binding, affinity, on-rate, off-rate, avidity, specificity, half-life, or any other suitable characteristic, as known in the art. Generally part or all of the non-human or human CDR sequences are maintained while the non-human sequences of the variable and constant regions are replaced with human or other amino acids. Antibodies can also optionally be humanized with retention of high affinity for the antigen and other favorable biological properties. To achieve this goal, humanized antibodies can be optionally prepared by a process of analysis of the parental sequences and various conceptual humanized products using three-dimensional models of the parental and humanized sequences. Three-dimensional immunoglobulin models are commonly available and are familiar to those skilled in the art. Computer programs are available which illustrate and display probable three-dimensional conformational structures of selected candidate immunoglobulin sequences. Inspection of these displays permits analysis of the likely role of the residues in the functioning of the candidate immunoglobulin sequence, i.e., the analysis of residues that influence the ability of the candidate immunoglobulin to bind its antigen. In this way, FR residues can be selected and combined from the consensus and import sequences so that the desired antibody characteristic, such as increased affinity for the target antigen(s), is achieved. In general, the CDR residues are directly and most substantially involved in influencing antigen binding. Humanization or engineering of antibodies of the present invention can be performed using any known method, such as but not limited to those described in, Winter (Jones et al., Nature 321:522 (1986); Riechmann et al., Nature 332:323 (1988); Verhoeyen et al., Science 239:1534 (1988)), Sims et al., J. Immunol. 151: 2296 (1993); Chothia and Lesk, J. Mol. Biol. 196:901 (1987), Carter et al., Proc. Natl. Acad. Sci. U.S.A. 89:4285 (1992); Presta et al., J. Immunol. 151:2623 (1993), U.S. Pat. Nos. 5,723,323, 5,976,862, 5,824,514, 5,817,483, 5,814,476, 5,763,192, 5,723,323, 5,766,886, 5,714,352, 6,204,023, 6,180,370, 5,693,762, 5,530,101, 5,585,089, 5,225,539; 4,816,567, PCT/: US98/16280, US96/18978, US91/09630, US91/05939, US94/01234, GB89/01334, GB91/01134, GB92/01755; WO90/14443, WO90/14424, WO90/14430, EP 229246, each entirely incorporated herein by reference, included references cited therein.

[0500] Typically, the starting reference or parental antibody, generally one that is partially non-human, that is humanized herein is one that has a ratio of binding activity under conditions that exist in a tumor microenvironment that include one or both of pH between or about between pH 5.6 to 6.8 or lactate concentration of between or about between 5 mM to 20 mM (e.g. pH 6.0 and/or 16.6 mM lactate) and 10 mg/mL to 50 mg/mL protein (e.g. 20% to 50% human serum), compared to under conditions that exist in a non-tumor microenvironment that include one or both of pH between or about between pH 7.0 to 7.8 or lactate concentration between or about between 0.5 mM to 5 mM (e.g. pH 7.4 and/or 1 mM lactate) and 10 mg/mL to 50 mg/mL protein (e.g. 20% to 50% human serum) of greater than 1.0 as described herein above, such as generally at least greater than 2.0, 3.0, 4.0, 5.0, 6.0, 7.0, 7.0, 8.0, 9.0, 10.0, 15.0, 20.0, 25.0, 30.0, 35.0, 40.0, 50.0 or more. Exemplary of such antibodies are any that contain a variable heavy chain set forth in SEQ ID NOS:495, 1062, 1112, 1114-1119, 1124-1131 or a sequence that exhibits at least 75%, 80%, 81%, 82%, 83%, 84%, 85%, 86%, 86%, 88%, 89%, 90%, 91%, 92%, 93%, 94%, 95%, 96%, 97%, 98%, 99% or more sequence identity to any of SEQ ID NOS: 495, 1062, 1112, 1114-1119, 1124-1131; and a variable light chain set forth in SEQ ID NOS:4 or 10.

[0501] For example, antibody humanization can be performed by, for example, synthesizing a combinatorial library containing the six CDRs of a target antibody to be humanized (e.g. any of the antibodies set forth above) fused in frame to a pool of individual human frameworks. For example, the CDRs can be derived from any one or more of the CDRH1 (amino acid residues 26-35, according to AbM definition, or amino acid residues 31-35, according to Kabat definition), CDRH2 (amino acid residues 50-65) or CDRH3 (amino acid residues 95-102) set forth in any of SEQ ID NOS: 495, 1062, 1112, 1114-1119, 1124-1131 and/or can be derived from any one or more of the CDRL1 (amino acid residues 24-34), CDRL2 (amino acid residues 50-56) or CDRL1 (amino acid residues 89-97) set forth in any of SEQ ID NOS: 4 or 10. A human framework library that contains genes representative of all known heavy and light chain human germline genes can be utilized. The resulting combinatorial libraries can then be screened for binding to antigens of interest. This approach can allow for the selection of the most favorable combinations of fully human frameworks in terms of maintaining the binding activity to the parental antibody. Humanized antibodies can then be further optimized by a variety of techniques.

[0502] The number of amino acid substitutions or replacements a skilled artisan can make to effect humanization depends on many factors, including those described above. Generally speaking, the number of amino acid replacements (substitutions), insertions or deletions for an anti-EGFR antibody, fragment or variant will not be more than 40, 30, 20, 19, 18, 17, 16, 15, 14, 13, 12, 11, 10, 9, 8, 7, 6, 5, 4, 3, 2, 1, such as 1-30 or any range or value therein, as specified herein.

[0503] Amino acids in an anti-EGFR antibody that are essential for function can be identified by methods known in the art, such as site-directed mutagenesis or alanine-scanning mutagenesis (e.g., Ausubel, supra, Chapters 8, 15; Cunningham and Wells, Science 244:1081-1085 (1989)). The latter procedure introduces single alanine mutations at every residue in the molecule. The resulting mutant molecules are then tested for biological activity, such as, but not limited to binding to EGFR using any of the methods described herein. Sites that are critical for antibody binding can also be identified by structural analysis such as crystallization, nuclear magnetic resonance or photoaffinity labeling (Smith, et al., J. Mol. Biol. 224:899-904 (1992) and de Vos, et al., Science 255:306-312 (1992)).

[0504] A humanized clone provided herein includes any that exhibits at least 56% sequence identity, such as at least 57%, 58%, 59%, 60%, 61%, 62%, 63%, 64%, 65%, 66%, 67%, 68%, 69%, 70% or more sequence identity to its closest human V_{H} gene segment germline sequence; and at least 75%, 76%, 77%, 78%, 79%, 80% or more sequence identity to its closest human V_{L} gene segment germline sequence. The sequence of human germline segments are known and available to a skilled artisan. For example, gene segment sequences are accessible from known database (e.g., National Center for Biotechnology Information (NCBI), the international ImMunoGeneTics information System® (IMGT), the Kabat database and the Tomlinson's VBase database (Lefranc (2003) Nucleic Acids Res., 31:307-310; Martin et al., Bioinformatics Tools for Antibody Engineering in Handbook of Therapeutic Antibodies, Wiley-VCH (2007), pp. 104-107; see also published International PCT Application No. WO2010/054007). Further, databases are available that can be searched for closest germline sequences, such as IgBlast from the National Center for Biotechnology Information (NCBI; www.ncbi.nlm.nih.gov/igblast/), which is designed to analyze the V (variable) region of an Ig sequence. In performing such search, the query sequence must contain some part of the V gene segment (e.g. residues 1-97 of the variable heavy chain; residues 1-95 of the variable light chain).

[0505] In one example, humanized clones provided herein are derived from an anti-EGFR antibody designated Y104D/Q111P (DP) having a variable heavy chain set forth in SEQ ID NO:1062 and a variable light chain set forth in SEQ ID NO:4 or 10. In another example, humanized clones provided herein are derived from an anti-EGFR antibody designated T30F/Y104D/Q111P (FDP) having a variable heavy chain set forth in SEQ ID NO: 1125 and a variable light chain set forth in SEQ ID NO: 4 or 10. Non-limiting examples of such humanized clones are set forth in Table 8. Tables 8-10 set forth the SEQ ID NO (SEQ) of the variable heavy and light chain of each clone. Tables 9 and 10 also summarize the sequence identity of the humanized clones to the variable sequence of the parental cetuximab and to its closest human V region germline sequences designated IGHV3-33(VH) and IGKV6-21 (VL) (see e.g. Nagdelaine-Beuzelin et al. (2007) Critical Reviews in Oncology/Hematology (2007) 64:210-225). The closest germline sequence of each clone as identified using IgBlast also is indicated in bold.

TABLE 8
Anti-EGFR Antibody Clones

| | |
|---|---|
| variable heavy chain | variable light chain |

| | SEQ ID | SEQ ID | SEQ ID | SEQ |
|---|---|---|---|---|
| | NO: | NO: | NO: | ID NO: |
| Name | (protein) | (DNA) | (protein) | (DNA) |
| DP-h01 | 1134 | 1160 | 1138 | 1164 |
| DP-h02 | 1134 | 1160 | 1139 | 1165 |
| DP-h03 | 1135 | 1161 | 1138 | 1164 |
| DP-h04 | 1134 | 1160 | 1140 | 1166 |
| DP-h05 | 1134 | 1160 | 1141 | 1167 |
| DP-h06 | 1134 | 1160 | 1142 | 1168 |
| DP-h07 | 1135 | 1161 | 1142 | 1168 |
| DP-h08 | 1134 | 1160 | 1143 | 1169 |
| DP-h09 | 1136 | 1162 | 1142 | 1168 |
| DP-h10 | 1137 | 1163 | 1144 | 1170 |
| DP-h12 | 1136 | 1162 | 1144 | 1170 |
| DP-h13 | 1137 | 1163 | 1145 | 1171 |
| DP-h14 | 1136 | 1162 | 1145 | 1171 |
| FDP-h01 | 1146 | 1172 | 1153 | 1179 |
| FDP-h02 | 1147 | 1173 | 1153 | 1179 |
| FDP-h03 | 1148 | 1174 | 1154 | 1180 |
| FDP-h04 | 1149 | 1175 | 1154 | 1180 |
| FDP-h05 | 1150 | 1176 | 1155 | 1181 |
| FDP-h06 | 1151 | 1177 | 1156 | 1182 |
| FDP-h07 | 1148 | 1174 | 1156 | 1182 |
| FDP-h07* | 1146 | 1172 | 1156 | 1182 |
| FDP-h08 | 1149 | 1175 | 1156 | 1182 |
| FDP-h09 | 1150 | 1176 | 1157 | 1183 |
| FDP-h10 | 1152 | 1178 | 1157 | 1183 |
| FDP-h11 | 1148 | 1174 | 1157 | 1183 |
| FDP-h12 | 1149 | 1175 | 1157 | 1183 |
| FDP-h13 | 1150 | 1176 | 1186 | 1187 |
| FDP-h14 | 1152 | 1178 | 1186 | 1187 |
| FDP-h15 | 1148 | 1174 | 1186 | 1187 |
| FDP-h16 | 1149 | 1175 | 1186 | 1187 |
| FDP-h17 | 1150 | 1176 | 1158 | 1184 |
| FDP-h18 | 1152 | 1178 | 1159 | 1185 |
| FDP-h19 | 1146 | 1172 | 1159 | 1185 |
| FDP-h20 | 1146 | 1172 | 1157 | 1183 |
| FDP-h21 | 1146 | 1172 | 1186 | 1187 |

TABLE 9
Anti-EGFR Variable Heavy Chain Sequence Identity (V region gene Segment)

| | | | | IGHV3- | IGHV1- | IGHV1- | IGHV3- | IGHV2- | IGHV3- |
|---|---|---|---|---|---|---|---|---|---|
| | | | | 33*01 | 3*01 | 46*03 | NL1*01 | 26*01 | 15*07 |
| | | cetuximab | | SEQ ID | SEQ ID | SEQ ID | SEQ ID | SEQ ID | SEQ ID |
| | | (SEQ ID NO: 3) | | NO: 1191 | NO: 1192 | NO: 1193 | NO: 1194 | NO: 1195 | NO: 1196 |
| | SEQ | variable | V | V | V | V | V | V | V |
| | ID | domain | segment | segment | segment | segment | segment | segment | segment |
| | NO | (1-119) | (1-97) | (1-98) | (1-98) | (1-98) | (1-98) | (1-100) | (1-100) |
| cetuximab | 3 | | | 55 | 49 | 50 | 54 | 58 | 52 |
| DP-h01 | 1134 | 78 | 75 | 64 | | | | | |
| DP-h02 | 1134 | 78 | 75 | 64 | | | | | |
| DP-h03 | 1135 | 70 | 65 | | 67 | | | | |
| DP-h04 | 1134 | 78 | 75 | 64 | | | | | |
| DP-h05 | 1134 | 78 | 75 | 64 | | | | | |
| DP-h06 | 1134 | 78 | 75 | 64 | | | | | |
| DP-h07 | 1135 | 70 | 65 | | 67 | | | | |
| DP-h08 | 1134 | 78 | 75 | 64 | | | | | |
| DP-h09 | 1136 | 72 | 68 | | | 56 | | | |
| DP-h10 | 1137 | 71 | 67 | | | | 63 | | |
| DP-h12 | 1136 | 72 | 68 | | | 56 | | | |
| DP-h13 | 1137 | 71 | 67 | | | | 63 | | |
| DP-h14 | 1136 | 72 | 68 | | | 56 | | | |
| FDP- | 1146 | 71 | 67 | | | | 65 | | |
| h01 | | | | | | | | | |
| FDP- | 1147 | 68 | 63 | | 65 | | | | |
| h02 | | | | | | | | | |
| FDP- | 1148 | 69 | 64 | | 65 | | | | |
| h03 | | | | | | | | | |
| FDP- | 1149 | 78 | 75 | | | | | 70 | |
| h04 | | | | | | | | | |
| FDP- | 1150 | 71 | 67 | | | | 65 | | |
| h05 | | | | | | | | | |
| FDP- | 1151 | 71 | 67 | | | | 63 | | |
| h06 | | | | | | | | | |
| FDP- | 1148 | 69 | 64 | | 65 | | | | |
| h07 | | | | | | | | | |
| FDP- | 1146 | 71 | 67 | | | | 65 | | |
| h07* | | | | | | | | | |
| FDP- | 1149 | 78 | 75 | | | | | 70 | |
| h08 | | | | | | | | | |
| FDP- | 1150 | 71 | 67 | | | | 65 | | |
| h09 | | | | | | | | | |
| FDP- | 1152 | 70 | 65 | | | | | | 65 |
| h10 | | | | | | | | | |
| FDP- | 1148 | 69 | 64 | | 65 | | | | |
| h11 | | | | | | | | | |
| FDP- | 1149 | 78 | 75 | | | | | 70 | |
| h12 | | | | | | | | | |
| FDP- | 1150 | 71 | 67 | | | | 65 | | |
| h13 | | | | | | | | | |
| FDP- | 1152 | 70 | 65 | | | | | | 65 |
| h14 | | | | | | | | | |
| FDP- | 1148 | 69 | 64 | | 65 | | | | |
| h15 | | | | | | | | | |
| FDP- | 1149 | 78 | 75 | | | | | 70 | |
| h16 | | | | | | | | | |
| FDP- | 1150 | 71 | 67 | | | | 65 | | |
| h17 | | | | | | | | | |
| FDP- | 1152 | 70 | 65 | | | | | | 65 |
| h18 | | | | | | | | | |
| FDP- | 1146 | 71 | 67 | | | | 65 | | |
| h19 | | | | | | | | | |
| FDP- | 1146 | 71 | 67 | | | | 65 | | |
| h20 | | | | | | | | | |
| FDP- | 1146 | 71 | 67 | | | | 65 | | |
| h21 | | | | | | | | | |

TABLE 10
Anti-EGFR Variable Light Chain Sequence Identity (V region gene segment)

| | | | cetuximab | | | | |
|---|---|---|---|---|---|---|---|
| | | | | IGKV1D- | IGKV1- | IGKV3- | IGKV3- |
| | SEQ ID | variable | V | 13*01 | 39*01 | 11*01 | 15*01 |
| | NO: | domain | segment | (SEQ ID | (SEQ ID | (SEQ ID | (SEQ ID |
| | (Protein) | (1-107) | (1-95) | NO: 1197) | NO: 1198) | NO: 1199) | NO: 1200) |
| cetuximab | 4 | 100 | | 61 | 60 | 64 | 65 |
| DP-h01 | 1138 | 76 | 74 | 85 | | | |
| DP-h02 | 1139 | 75 | 73 | 83 | | | |
| DP-h03 | 1138 | 76 | 74 | 85 | | | |
| DP-h04 | 1140 | 75 | 73 | 87 | | | |
| DP-h05 | 1141 | 76 | 74 | | 78 | | |
| DP-h06 | 1142 | 75 | 73 | 77 | | | |
| DP-h07 | 1142 | 75 | 73 | 77 | | | |
| DP-h08 | 1143 | 76 | 74 | 80 | | | |
| DP-h09 | 1142 | 75 | 73 | 77 | | | |
| DP-h10 | 1144 | 77 | 75 | | | 82 | |
| DP-h12 | 1144 | 77 | 75 | | | 82 | |
| DP-h13 | 1145 | 76 | 74 | | | | 81 |
| DP-h14 | 1145 | 76 | 74 | | | | 81 |
| FDP-h01 | 1153 | 76 | 74 | | | | 81 |
| FDP-h02 | 1153 | 76 | 74 | | | | 81 |
| FDP-h03 | 1154 | 75 | 73 | 77 | | | |
| FDP-h04 | 1154 | 75 | 73 | 77 | | | |
| FDP-h05 | 1155 | 77 | 75 | | | 82 | |
| FDP-h06 | 1156 | 78 | 76 | | | 82 | |
| FDP-h07 | 1156 | 78 | 76 | | | 82 | |
| FDP-h07* | 1156 | 78 | 76 | | | 82 | |
| FDP-h08 | 1156 | 78 | 76 | | | 82 | |
| FDP-h09 | 1157 | 76 | 74 | 80 | | | |
| FDP-h10 | 1157 | 76 | 74 | 80 | | | |
| FDP-h11 | 1157 | 76 | 74 | 80 | | | |
| FDP-h12 | 1157 | 76 | 74 | 80 | | | |
| FDP-h13 | 1186 | 76 | 74 | 80 | | | |
| FDP-h14 | 1186 | 76 | 74 | 80 | | | |
| FDP-h15 | 1186 | 76 | 74 | 80 | | | |
| FDP-h16 | 1186 | 76 | 74 | 80 | | | |
| FDP-h17 | 1158 | 78 | 76 | | | | 86 |
| FDP-h18 | 1159 | 75 | 73 | 77 | | | |
| FDP-h19 | 1159 | 75 | 73 | 77 | | | |
| FDP-h20 | 1157 | 76 | 74 | 80 | | | |
| FDP-h21 | 1186 | 76 | 74 | 80 | | | |

[0506] Hence, provided herein are anti-EGFR antibodies containing a variable heavy and light chain having a sequence of amino acids set forth as: the variable heavy chain set forth in SEQ ID NO:1134 or a sequence of amino acids that exhibits at least 85% sequence identity to SEQ ID NO:1134, and the variable light chain set forth in SEQ ID NO:1138 or a sequence of amino acids that exhibits at least 85% sequence identity to SEQ ID NO:1138;

[0507] the variable heavy chain set forth in SEQ ID NO:1134 or a sequence of amino acids that exhibits at least 85% sequence identity to SEQ ID NO:1134, and the variable light chain set forth in SEQ ID NO:1139 or a sequence of amino acids that exhibits at least 85% sequence identity to SEQ ID NO:1139;

[0508] the variable heavy chain set forth in SEQ ID NO:1135 or a sequence of amino acids that exhibits at least 85% sequence identity to SEQ ID NO:1135, and the variable light chain set forth in SEQ ID NO:1138 or a sequence of amino acids that exhibits at least 85% sequence identity to SEQ ID NO:1138;

[0509] the variable heavy chain set forth in SEQ ID NO:1134 or a sequence of amino acids that exhibits at least 85% sequence identity to SEQ ID NO:1134, and the variable light chain set forth in SEQ ID NO:1140 or a sequence of amino acids that exhibits at least 85% sequence identity to SEQ ID NO:1140;

[0510] the variable heavy chain set forth in SEQ ID NO:1134 or a sequence of amino acids that exhibits at least 85% sequence identity to SEQ ID NO:1134, and the variable light chain set forth in SEQ ID NO:1141 or a sequence of amino acids that exhibits at least 85% sequence identity to SEQ ID NO:1141;

[0511] the variable heavy chain set forth in SEQ ID NO:1134 or a sequence of amino acids that exhibits at least 85% sequence identity to SEQ ID NO:1134, and the variable light chain set forth in SEQ ID NO:1142 or a sequence of amino acids that exhibits at least 85% sequence identity to SEQ ID NO:1142;

[0512] the variable heavy chain set forth in SEQ ID NO:1135 or a sequence of amino acids that exhibits at least 85% sequence identity to SEQ ID NO:1135, and the variable light chain set forth in SEQ ID NO:1142 or a sequence of amino acids that exhibits at least 85% sequence identity to SEQ ID NO:1142;

[0513] the variable heavy chain set forth in SEQ ID NO:1134 or a sequence of amino acids that exhibits at least 85% sequence identity to SEQ ID NO:1134, and the variable light chain set forth in SEQ ID NO:1143 or a sequence of amino acids that exhibits at least 85% sequence identity to SEQ ID NO:1143;

[0514] the variable heavy chain set forth in SEQ ID NO:1136 or a sequence of amino acids that exhibits at least 85% sequence identity to SEQ ID NO:1136, and the variable light chain set forth in SEQ ID NO:1142 or a sequence of amino acids that exhibits at least 85% sequence identity to SEQ ID NO:1142;

[0515] the variable heavy chain set forth in SEQ ID NO:1137 or a sequence of amino acids that exhibits at least 85% sequence identity to SEQ ID NO:1137, and the variable light chain set forth in SEQ ID NO:1144 or a sequence of amino acids that exhibits at least 85% sequence identity to SEQ ID NO:1144;

[0516] the variable heavy chain set forth in SEQ ID NO:1136 or a sequence of amino acids that exhibits at least 85% sequence identity to SEQ ID NO:1136, and the variable light chain set forth in SEQ ID NO:1144 or a sequence of amino acids that exhibits at least 85% sequence identity to SEQ ID NO:1144;

[0517] the variable heavy chain set forth in SEQ ID NO:1137 or a sequence of amino acids that exhibits at least 85% sequence identity to SEQ ID NO:1137, and the variable light chain set forth in SEQ ID NO:1145 or a sequence of amino acids that exhibits at least 85% sequence identity to SEQ ID NO:1145;

[0518] the variable heavy chain set forth in SEQ ID NO:1136 or a sequence of amino acids that exhibits at least 85% sequence identity to SEQ ID NO:1136, and the variable light chain set forth in SEQ ID NO:1145 or a sequence of amino acids that exhibits at least 85% sequence identity to SEQ ID NO:1145;

[0519] the variable heavy chain set forth in SEQ ID NO:1146 or a sequence of amino acids that exhibits at least 85% sequence identity to SEQ ID NO:1146, and the variable light chain set forth in SEQ ID NO:1153 or a sequence of amino acids that exhibits at least 85% sequence identity to SEQ ID NO:1153;

[0520] the variable heavy chain set forth in SEQ ID NO:1147 or a sequence of amino acids that exhibits at least 85% sequence identity to SEQ ID NO:1147, and the variable light chain set forth in SEQ ID NO:1153 or a sequence of amino acids that exhibits at least 85% sequence identity to SEQ ID NO:1153;

[0521] the variable heavy chain set forth in SEQ ID NO:1148 or a sequence of amino acids that exhibits at least 85% sequence identity to SEQ ID NO:1148, and the variable light chain set forth in SEQ ID NO:1154 or a sequence of amino acids that exhibits at least 85% sequence identity to SEQ ID NO:1154;

[0522] the variable heavy chain set forth in SEQ ID NO:1149 or a sequence of amino acids that exhibits at least 85% sequence identity to SEQ ID NO:1149, and the variable light chain set forth in SEQ ID NO:1154 or a sequence of amino acids that exhibits at least 85% sequence identity to SEQ ID NO:1154;

[0523] the variable heavy chain set forth in SEQ ID NO:1150 or a sequence of amino acids that exhibits at least 85% sequence identity to SEQ ID NO:1150, and the variable light chain set forth in SEQ ID NO:1155 or a sequence of amino acids that exhibits at least 85% sequence identity to SEQ ID NO:1155;

[0524] the variable heavy chain set forth in SEQ ID NO:1151 or a sequence of amino acids that exhibits at least 85% sequence identity to SEQ ID NO:1151, and the variable light chain set forth in SEQ ID NO:1156 or a sequence of amino acids that exhibits at least 85% sequence identity to SEQ ID NO:1156;

[0525] the variable heavy chain set forth in SEQ ID NO:1148 or a sequence of amino acids that exhibits at least 85% sequence identity to SEQ ID NO:1148, and the variable light chain set forth in SEQ ID NO:1156 or a sequence of amino acids that exhibits at least 85% sequence identity to SEQ ID NO:1156;

[0526] the variable heavy chain set forth in SEQ ID NO:1146 or a sequence of amino acids that exhibits at least 85% sequence identity to SEQ ID NO:1146, and the variable light chain set forth in SEQ ID NO:1156 or a sequence of amino acids that exhibits at least 85% sequence identity to SEQ ID NO:1156;

[0527] the variable heavy chain set forth in SEQ ID NO:1149 or a sequence of amino acids that exhibits at least 85% sequence identity to SEQ ID NO:1149, and the variable light chain set forth in SEQ ID NO:1156 or a sequence of amino acids that exhibits at least 85% sequence identity to SEQ ID NO:1156;

[0528] the variable heavy chain set forth in SEQ ID NO:1150 or a sequence of amino acids that exhibits at least 85% sequence identity to SEQ ID NO:1150, and the variable light chain set forth in SEQ ID NO:1157 or a sequence of amino acids that exhibits at least 85% sequence identity to SEQ ID NO:1157;

[0529] the variable heavy chain set forth in SEQ ID NO:1152 or a sequence of amino acids that exhibits at least 85% sequence identity to SEQ ID NO:1152, and the variable light chain set forth in SEQ ID NO:1157 or a sequence of amino acids that exhibits at least 85% sequence identity to SEQ ID NO:1157;

[0530] the variable heavy chain set forth in SEQ ID NO:1148 or a sequence of amino acids that exhibits at least 85% sequence identity to SEQ ID NO:1148, and the variable light chain set forth in SEQ ID NO:1157 or a sequence of amino acids that exhibits at least 85% sequence identity to SEQ ID NO:1157;

[0531] the variable heavy chain set forth in SEQ ID NO:1149 or a sequence of amino acids that exhibits at least 85% sequence identity to SEQ ID NO:1149, and the variable light chain set forth in SEQ ID NO:1157 or a sequence of amino acids that exhibits at least 85% sequence identity to SEQ ID NO:1157;

[0532] the variable heavy chain set forth in SEQ ID NO:1150 or a sequence of amino acids that exhibits at least 85% sequence identity to SEQ ID NO:1150, and the variable light chain set forth in SEQ ID NO:1186 or a sequence of amino acids that exhibits at least 85% sequence identity to SEQ ID NO:1186;

[0533] the variable heavy chain set forth in SEQ ID NO:1152 or a sequence of amino acids that exhibits at least 85% sequence identity to SEQ ID NO:1152, and the variable light chain set forth in SEQ ID NO:1186 or a sequence of amino acids that exhibits at least 85% sequence identity to SEQ ID NO:1186;

[0534] the variable heavy chain set forth in SEQ ID NO:1148 or a sequence of amino acids that exhibits at least 85% sequence identity to SEQ ID NO:1148, and the variable light chain set forth in SEQ ID NO:1186 or a sequence of amino acids that exhibits at least 85% sequence identity to SEQ ID NO:1186;

[0535] the variable heavy chain set forth in SEQ ID NO:1149 or a sequence of amino acids that exhibits at least 85% sequence identity to SEQ ID NO:1149, and the variable light chain set forth in SEQ ID NO:1186 or a sequence of amino acids that exhibits at least 85% sequence identity to SEQ ID NO:1186;

[0536] the variable heavy chain set forth in SEQ ID NO:1150 or a sequence of amino acids that exhibits at least 85% sequence identity to SEQ ID NO:1150, and the variable light chain set forth in SEQ ID NO:1158 or a sequence of amino acids that exhibits at least 85% sequence identity to SEQ ID NO:1158;

[0537] the variable heavy chain set forth in SEQ ID NO:1152 or a sequence of amino acids that exhibits at least 85% sequence identity to SEQ ID NO:1152, and the variable light chain set forth in SEQ ID NO:1159 or a sequence of amino acids that exhibits at least 85% sequence identity to SEQ ID NO:1159;

[0538] the variable heavy chain set forth in SEQ ID NO:1146 or a sequence of amino acids that exhibits at least 85% sequence identity to SEQ ID NO:1146, and the variable light chain set forth in SEQ ID NO:1159 or a sequence of amino acids that exhibits at least 85% sequence identity to SEQ ID NO:1159;

[0539] the variable heavy chain set forth in SEQ ID NO:1146 or a sequence of amino acids that exhibits at least 85% sequence identity to SEQ ID NO:1146, and the variable light chain set forth in SEQ ID NO:1157 or a sequence of amino acids that exhibits at least 85% sequence identity to SEQ ID NO:1157; and

[0540] the variable heavy chain set forth in SEQ ID NO:1146 or a sequence of amino acids that exhibits at least 85% sequence identity to SEQ ID NO:1146, and the variable light chain set forth in SEQ ID NO:1186 or a sequence of amino acids that exhibits at least 85% sequence identity to SEQ ID NO:1186.

[0541] Any of the above anti-EGFR antibodies can further contain a heavy chain constant region or light chain constant region, or a portion thereof. The constant region can be any immunoglobulin type (e.g., IgG, IgM, IgD, IgE, IgA and IgY), any class (e.g. IgG1, IgG2, IgG3, IgG4, IgA1 and IgA2) or subclass (e.g., IgG2a and IgG2b). In particular examples, the antibodies provided herein can be full-length antibodies further containing a constant region from an IgG1 antibodies, or other subtype from among IgG2, IgG3 or IgG4. For example, the anti-EGFR antibodies can be full-length IgG1 antibodies be full-length IgG1 antibodies containing a kappa light chain constant region from cetuximab (set forth in SEQ ID NO:1071) or an IgG1 heavy chain constant region from cetuximab (set forth in SEQ ID NO:1069). The heavy chain constant region also can be a human IgG1 heavy chain set forth in SEQ ID NO:22, from an Ig classes, such as IgG2 (set forth in SEQ ID NO:23), IgG3 (set forth in SEQ ID NO:24) or IgG4 (set forth in SEQ ID NO:25), or can be a modified IgG1 heavy chain constant region set forth in SEQ ID NO:26, 27 or 1070. The light chain constant region also can be a human kappa light chain (set forth in SEQ ID NO:1072) or a human lambda light chain (set forth in SEQ ID NO:1073).

[0542] Modified anti-EGFR antibodies provided herein also include antibody fragments, which are derivatives of full-length antibody that contain less than the full sequence of the full-length antibodies but retain at least a portion of the specific binding abilities of the full-length antibody, for example the variable portions of the heavy and light chain. The antibody fragments also can include antigen-binding portions of an antibody that can be inserted into an antibody framework (e.g., chimeric antibodies) in order to retain the binding affinity of the parent antibody. Examples of antibody fragments include, but are not limited to, Fab, Fab′, F(ab′)₂, single-chain Fv (scFv), Fv, dsFv, diabody, Fd and Fd′ fragments, and other fragments, including modified fragments (see, for example, Methods in Molecular Biology, Vol. 207: Recombinant Antibodies for Cancer Therapy Methods and Protocols (2003); Chapter 1; p 3-25, Kipriyanov). Antibody fragments can include multiple chains linked together, such as by disulfide bridges and can be produced recombinantly. Antibody fragments also can contain synthetic linkers, such as peptide linkers, to link two or more domains. Methods for generating antigen-binding fragments are well-known in the art and can be used to modify any antibody provided herein. Fragments of antibody molecules can be generated, such as for example, by enzymatic cleavage. For example, upon protease cleavage by papain, a dimer of the heavy chain constant regions, the Fc domain, is cleaved from the two Fab regions (i.e. the portions containing the variable regions).

[0543] Single chain antibodies can be recombinantly engineered by joining a heavy chain variable region (V_{H}) and light chain variable region (V_{I}) of a specific antibody. The particular nucleic acid sequences for the variable regions can be cloned by standard molecular biology methods, such as, for example, by polymerase chain reaction (PCR) and other recombination nucleic acid technologies. Methods for producing scFvs are described, for example, by Whitlow and Filpula (1991) Methods, 2: 97-105; Bird et al. (1988) Science 242:423-426; Pack et al. (1993) Bio/Technology 11:1271-77; and U.S. Pat. Nos. 4,946,778, 5,840,300, 5,667,988, 5,658,727, 5,258,498).

[0544] The above anti-EGFR antibodies, or antigen-binding fragments the anti-EGFR antibodies provided herein, including modified anti-EGFR antibodies and antigen binding fragments of any of the anti-EGFR antibodies, bind to EGFR (particularly human EGFR) with a higher binding activity under conditions that exist in a tumor microenvironment that include one or both of pH between or about between pH 5.6 to 6.8 or lactate concentration of between or about between 5 mM to 20 mM and 10 mg/mL to 50 mg/mL protein (e.g. 20% to 50% human serum), compared to under conditions that exist in a non-tumor microenvironment that include one or both of pH between or about between pH 7.0 to 7.8 or lactate concentration between or about between 0.5 mM to 5 mM and 10 mg/mL to 50 mg/mL protein (e.g. 20% to 50% human serum). The higher binding activity under conditions in a tumor microenvironment compared to under conditions in a non-tumor microenvironment generally exists under conditions where the protein concentration under conditions in a tumor microenvironment and under conditions in a non-tumor microenvironment is substantially the same or is the same. In particular examples, the ratio of activity can be at least or greater than 2.0, and generally greater than 3.0, 3.5, 4.0, 4.5, 5.0, 6.0, 7.0, 8.0, 9.0, 10.0, 11.0, 12.0, 13.0, 14.0, 15.0, 20.0, 25.0, 30.0, 35.0, 40.0, 45.0, 50.0 or more.

[0545] Any of the above anti-EGFR antibodies, or antigen-binding fragments thereof, also effect significant productivity when produced in mammalian cells, particular compared to the non-humanized parental antibody. For example, mammalian host cells containing nucleic acid encoding any of the above anti-EGFR antibodies (e.g. containing a nucleic acid encoding a heavy and light chain as set forth in Table 8) can effect expression of the antibody at a concentration that is greater than or greater than about or that is at least 1 mg/mL, 1.5 mg/mL, 2.0 mg/mL, 2.5 mg/mL, 3.0 mg/mL, 3.5 mg/mL, 4.0 mg/mL, 4.5 mg/mL, 5.0 mg/mL, 5.5 mg/mL, 6.0 mg/mL, 6.5 mg/mL, 7.0 mg/mL, 8.0 mg/mL, 9.0 mg/mL, 10.0 mg/mL or more.

[0546] 3. Additional Modifications

[0547] Any of the modified anti-EGFR antibodies provided herein can contain one or more additional modifications. The modifications (e.g. amino acid replacements) can be in the variable region or constant region of the heavy or light chain. Examples of additional modifications that can be included in the modified anti-EGFR antibodies provided herein include, but are not limited to, those described in U.S. Pat. Nos. 7,657,380, 7,930,107, 7,060,808, 7,723,484, U.S. Pat. Publ. Nos. 2011014822, 2005142133, 2011117110, International Pat. Pub. Nos. WO2012003995, WO2010080463, WO2012020059, WO2008152537, and Lippow et al. (2007) Nat Biotechnol. 25(10):1171-1176. Non-limiting examples of exemplary amino acid modifications described in the art that can be included in any anti-EGFR antibody, or antigen binding fragment thereof, provided herein include, variants containing an amino acid replacement (substitution) in the variable light chain (V_{L}) at positions corresponding to replacement of Aspartate (D) at position 1 with Glutamate (E), D1C, I2T, I2C, L3V, L3T, L3C, L4C, T5C, Q6C, S7C, P8C, V9C, V9A, V9D, V9G, V9P, V9S, I10T, I10S, I10F, I10C, L11Q, L11C, S12A, S12C, V13L, V13M, V13S, V13A, V13C, S14T, S14C, P15V, P15L, P15C, G16K, G16C, E17D, E17K, E17C, R18V, R18K, R18c, V19A, V19T, V19C, S20T, S20C, S20A, F21I, F21L, F21C, S22T, S22C, R24P, A25V, A25S, A25I, A25P, A25T, A25Y, A25C, A25F, A25M, A25L, A25W, S26D, Q27W, Q27E, Q27F, Q27Y, Q27T, Q27H, S28R, S28F, G30Y, G30C, G30H, G30K, G30Q, G30R, G30W, G30F, G30T, G30M, G30S, G30A, T31E, T31V, T31D, T31R, N32H, I33L, H34C, Q38K, R39K, T40P, T40S, N41G, N41D, G42Q, G42K, G42E, S43A, S43P, R45K, K49Y, K49F, Y50G, S53V, S60D, S60A, G64S, G64A, D70E, D70V, F71Y, S74T, N76S, N76T, S77R, S77G, V78L, E79Q, S80P, S80A, E81A, I83F, I83S, I83V, I83A, D85V, D85T, D85I, D85M, Y87S, Q89C, Q89H, Q90C, N91C, N91Q, N91L, N92C, N92L, N92R N92K, N92M, N92Y, N92H, N92E, N92F, N93A, N93D, N93E, N93V, N93K, N93C, W94F, W94Y, P95C, T96C, T96L, T96E, T97C, T97A, T97D, T97E, T97P, T97K, T97N, T97Q, T97I, T97G, T97L, T97H, T97R, T97S, G99A, A100G, A100Q, K103T, L104V and L106I, in the sequence of amino acids set forth in SEQ ID NO:4;

[0548] variants containing an amino acid replacement (substitution) in the variable heavy chain (V_{H}) at positions corresponding to replacement of Glutamine (Q) at position 1 with Glutamic acid (E), Q1C, V2C, Q3T, Q3C, L4C, K5Q, K5V, K5L, K5C, Q6E, Q6C, S7C, G8C, P9A, P9G, P9C, G10V, G10C, L11C, V12C, Q13K, Q13R, Q13C, P14C, S15G, S15T, S15C, Q16G, Q16R, Q16E, Q16C, S17T, S17C, L18C, S19K, S19R, S19T, S19C, I20L, I20C, T21S, T21C, T23A, T23K, T23C, V24A, V24C, S25C, F27G, S28N, S28T, L29I, T30S, T30K, N31V, N31D, N311, N31T, N32S, Y32R, Y32W, G33A, G33D, G33E, G33Y, V34L, V34N, V34E, V34Q, V34S, V34W, H35S, V37I, S40A, S40P, P41T, G44A, L48V, L48I, G49S, G49A, V50L, V50Q, V50E, V50I, V50Y, V50N, I51G, I51M, I51S, I51Q, I51A, I51C, I51V, W52F, W52Y, W52G, W52T, S53Q, S53T, S53N, S53Y, G54A, G54V, G54L, G54I, G54S, G55D, G55A, G55E, G55H, G55F, N56A, N56G, N56S, N56T, T57A, T57D, T57G, T57S, T57E, T57P, D58Y, D58N, Y59A, Y59C, Y59E, Y59F, Y59G, Y59S, Y59W, T59H, Y59P, Y59Q, N60D, N60A, T61E, T61P, P62S, F63L, F63V, T64K, T64E, T64A, T64N, T64D, 565G, L67F, L67V, S68T, N70S, N70T, K71V, D72E, N73T, S74A, S76N, Q77T, Q77S, V78L, V78F, V78A, F79Y, F79S, F79V, F80L, F80M, K81Q, K81T, K81E, K81Q, M82L, N83T, N83S, S84N, L85M, L85V, Q86R, Q86D, Q86T, S87A, S87P, N88E, N88V, N88G, N88A, N88D, I92T, 192V, A96C, R97c, A98C, L99C, L99E, T100D, T100C, T100A, Y101C, Y101W, Y101A, Y102C, Y102F, Y102A, Y102W, D103E, D103P, D103C, Y104C, E105C, E105N, E105D, E105Y, F106C, F106D, F106Y, A107C, A107D, Y108C and Y108F, in the sequence of amino acids set forth in SEQ ID NO:3; and

[0549] variants containing amino acid replacement (substitution) in the heavy chain constant regions, for example, in the hinge, C_{H}2 and C_{H}3 regions, including replacement of Proline (P) at position 230 with Alanine (A), E233D, L234D, L234E, L234N, L234Q, L234T, L234H, L234Y, L234I, L234V, L234F, L235D, L235S, L235N, L235Q, L235T, L235H, L235Y, L235I, L235V, L235F, S239D, S239E, S239N, S239Q, S239F, S239T, S239H, S239Y, V240I, V240A, V240T, V240M, F241W, F241L, F241Y, F241E, F241R, F243W, F243L F243Y, F243R, F243Q, P244H, P245A, P247V, P247G, V262I, V262A, V262T, V262E, V263I, V263A, V263T, V263M, V264L, V264I, V264W, V264T, V264R, V264F, V264M, V264Y, V264E, D265G, D265N, D265Q, D265Y, D265F, D265V, D265I, D265L, D265H, D265T, V266I, V266A, V266T, V266M, S267Q, S267L, S267T, S267H, S267D, S267N, E269H, E269Y, E269F, E269R, E269T, E269L, E269N, D270Q, D270T, D270H, E272S, E272K, E272I, E272Y, V273I, K274T, K274E, K274R, K274L, K274Y, F275W, N276S, N276E, N276R, N276L, N276Y, Y278T, Y278E, Y278K, Y278W, E283R, Y296E, Y296Q, Y296D, Y296N, Y296S, Y296T, Y296L, Y296I, Y296H, N297S, N297D, N297E, A298H, T299I, T299L, T299A, T299S, T299V, T299H, T299F, T299E, V302I, W313F, E318R, K320T, K320D, K320I, K322T, K322H, V323I, S324T, S324D, S324R, S324I, S324V, S324L, S324Y, N325Q, N325L, N325I, N325D, N325E, N325A, N325T, N325V, N325H, K326L, K326I, K326T, A327N, A327L, A327D, A327T, L328M, L328D, L328E, L328N, L328Q, L328F, L328I, L328V, L328T, L3281-1, L328A, P329F, A330L, A330Y, A330V, A330I, A330F, A330R, A330H, A330S, A330W, A330M, P331V, P331H, I332D, I332E, I332N, I332Q, I332T, I332H, I332Y, I332A, E333T, E333H, E333I, E333Y, K334I, K334T, K334F, T335D, T335R, T335Y, D221K, D221Y, K222E, K222Y, T223E, T223K, H224E, H224Y, T225E, T225E, T225K, T225W, P227E, P227K, P227Y, P227G, P228E, P228K, P228Y, P228G, P230E, P230Y, P230G, A231E, A231K, A231Y, A231P, A231G, P232E, P232K, P232Y, P232G, E233N, E233Q, E233K, E233R, E233S, E233T, E233H, E233A, E233V, E233L, E233I, E233F, E233M, E233Y, E233W, E233G, L234K, L234R, L234S, L234A, L234M, L234W, L234P, L234G, L235E, L235K, L235R, L235A, L235M, L235W, L235P, L235G, G236D, G236E, G236N, G236Q, G236K, G236R, G236S, G236T, G236H, G236A, G236V, G236L, G236I, G236F, G236M, G236Y, G236W, G236P, G237D, G237E, G237N, G237Q, G237K, G237R, G237S, G237T, G237H, G237V, G237L, G237I, G237F, G237M, G237Y, G237W, G237P, P238D, P238E, P238N, P238Q, P238K, P238R, P238S, P238T, P238H, P238V, P238L, P238I, P238F, P238M, P238Y, P238W, P238G, S239Q, S239K, S239R, S239V, S239L, S239I, S239M, S239W, S239P, S239G, F241D, F241E, F241Y, F243E, K246D, K246E, K246H, K246Y, D249Q, D249H, D249Y, R255E, R255Y, E258S, E258H, E258Y, T260D, T260E, T260H, T260Y, V262E, V262F, V264D, V264E, V264N, V264Q, V264K, V264R, V264S, V264H, V264W, V264P, V264G, D265Q, D265K, D265R, D265S, D265T, D265H, D265V, D265L, D265I, D265F, D265M, D265Y, D265W, D265P, S267E, S267Q, S267K, S267R, S267V, S267L, S267I, S267F, S267M, S267Y, S267W, S267P, H268D, H268E, H268Q, H268K, H268R, H268T, H268V, H268L, H268I, H268F, H268M, H268W, H268P, H268G, E269K, E269S, E269V, E269I, E269M, E269W, E269P, E269G, D270R, D270S, D270L, D270I, D270F, D270M, D270Y, D270W, D270P, D270G, P271D, P271E, P271N, P271Q, P271K, P271R, P271S, P271T, P271H, P271A, P271V, P271L, P271I, P271F, P271M, P271Y, P271W, P271G, E272D, E272R, E272T, E272H, E272V, E272L, E272F, E272M, E272W, E272P, E272G, K274D, K274N, K274S, K274H, K274V, K274I, K274F, K274M, K274W, K274P, K274G, F275L, N276D, N276T, N276H, N276V, N276I, N276F, N276M, N276W, N276P, N276G, Y278D, Y278N, Y278Q, Y278R, Y278S, Y278H, Y278V, Y278L, Y278I, Y278M, Y278P, Y278G, D280K, D280L, D280W, D280P, D280G, G281D, G281K, G281Y, G281P, V282E, V282K, V282Y, V282P, V282G, E283K, E283H, E283L, E283Y, E283P, E283G, V284E, V284N, V284T, V284L, V284Y, H285D, H285E, H285Q, H285K, H285Y, H285W, N286E, N286Y, N286P, N286G, K288D, K288E, K288Y, K290D, K290N, K290H, K290L, K290W, P291D, P291E, P291Q, P291T, P291H, P291I, P291G, R292D, R292E, R292T, R292Y, E293N, E293R, E293S, E293T, E293H, E293V, E293L, E293I, E293F, E293M, E293Y, E293W, E293P, E293G, E294K, E294R, E294S, E294T, E294H, E294V, E294L, E294I, E294F, E294M, E294Y, E294W, E294P, E294G, Q295D, Q295E, Q295N, Q295R, Q295S, Q295T, Q295H, Q295V, Q295I, Q295F, Q295M, Q295Y, Q295W, Q295P, Q295G, Y296K, Y296R, Y296A, Y296V, Y296M, Y296G, N297Q, N297K, N297R, N297T, N297H, N297V, N297L, N297I, N297F, N297M, N297Y, N297W, N297P, N297G, S298D, S298E, S298Q, S298K, S298R, S298I, S298F, S298M, S298Y, S298W, T299D, T299E, T299N, T299Q, T299K, I299R, T299L, T299F, T299M, T299Y, T299W, T299P, T299G, Y300D, Y300E, Y300N, Y300Q, Y300K, Y300R, Y300S, Y300T, Y300H, Y300A, Y300V, Y300M, Y300W, Y300P, Y300G, R301D, R301E, R301H, R301Y, V303D, V303E, V303Y, S304D, S304N, S304T, S304H, S304L, V305E, V305T, V305Y, K317E, K317Q, E318Q, E318H, E318L, E318Y, K320N, K320S, K320H, K320V, K320L, K320F, K320Y, K320W, K320P, K320G, K322D, K322S, K322V, K322I, K322F, K322Y, K322W, K322P, K322G, S324H, S324F, S324M, S324W, S324P, S324G, N325K, N325R, N325S, N325F, N325M, N325Y, N325W, N325P, N325G, K326P, A327E, A327K, A327R, A327H, A327V, A327I, A327F, A327M, A327Y, A327W, A327P, L328D, L328Q, L328K, L328R, L328S, L328T, L328V, L328I, L328Y, L328W, L328P, L328G, P329D, P329E, P329N, P329Q, P329K, P329R, P329S, P329T, P329H, P329V, P329L, P329I, P329M, P329Y, P329W, P329G, A330E, A330N, A330T, A330P, A330G, P331D, P331Q, P331R, P331T, P331L, P331I, P331F, P331M, P331Y, P331W, I332K, I332R, I332S, I332V, I332F, I332M, I332W, I332P, I332G, E333L, E333F, E333M, E333P, K334P, T335N, T335S, T335H, T335V, T335L, T335I, T335F, T335M, T335W, T335P, T335G, I336E, I336K, I336Y, S337E, S337N, S337H, S298A, K326A, K326S, K326N, K326Q, K326D, K325E, K326W, K326Y, E333A, E333S, K334A, K334E, Y300I, Y300L, Q295K, E294N, S298N, S298V, S298D, D280H, K290S, D280Q, D280Y, K290G, K290T, K290Y, T250Q, T250E, M428L, M428F, S239D, S239E, S239N, S239Q, S239T, V240I, V240M, V264I, V264T, V264Y, E272Y, K274E, Y278T, 297D, T299A, T299V, T299I, T299H, K326T, L328A, L328H, A330Y, A330L, A3301, 1332D, I332E, I332N, and I332Q, according to EU index numbering.

[0550] 4. Conjugates

[0551] Also provided herein are conjugates that contain a conditionally active anti-EGFR antibody provided herein linked directly or via a linker to one or more targeted agents. These conjugates contain the following components: antibody (Ab), (linker (L))_{q}, (targeted agent)ₘ and are represented by the formula: Ab-(L)_{q}-(targeted agent)ₘ, where q is 0 or more and m is at least 1. Thus, the conjugates provided herein contain one or more targeted agents covalently linked to an antibody provided herein that is conditionally active or selective for a tumor microenvironment and binds to EGFR.

[0552] Hence, these conjugates, also called antibody-drug conjugates (ADC) or immunoconjugates, can be used for targeted delivery of cytotoxic or cytostatic agents, i.e., drugs to kill or inhibit tumor cells in the treatment of cancer. Such conjugates exhibit selectivity to tumor cells that are desired to be eliminated over non-diseased cells, and thereby do not result in unacceptable levels of toxicity to normal cells. Therefore, the conjugates achieve maximal efficacy with minimal toxicity and reduced side effects. Hence, such compounds can be used in the methods described herein of diagnosis or treatment of cancer and other diseases or disorders.

[0553] As stated above, the number of targeted agents is designated by the variable m, where m is an integer of 1 or greater. The targeted agent is conjugated to an antibody provided herein by the number of linkers designated by the variable q, where q is 0 or any integer. The variables q and m are selected such that the resulting conjugate interacts with the EGFR of target cells, in particular, tumor cells in an acidic microenvironment, and the targeted agent is internalized by the target cell. Typically, m is between 1 and 8. q is 0 or more, depending upon the number of linked targeting and targeted agents and/or functions of the linker; q is generally 0 to 4. When more than one targeted agent is present in a conjugate the targeted agents may be the same or different.

[0554] The targeted agents can be covalently linked to the anti-EGFR antibody directly or by one or more linkers. Any suitable association among the elements of the conjugate is contemplated as long as the resulting conjugates interact with the EGFR of a target cell such that internalization of the associated targeted agent is effected. Thus, the conjugates provided herein can be produced as fusion proteins, can be chemically coupled, or can include a fusion protein portion and a chemically linked portion or any combination thereof.

[0555] The targeted agents also can be modified to render them more suitable for conjugation with the linker and/or the anti-EGFR antibody or to increase their intracellular activity. For example, in the case of polypeptide targeted agents, such modifications include, but are not limited to, the introduction of a Cys residue at or near the N-terminus or C-terminus, derivatization to introduce reactive groups, such as thiol groups, and addition of sorting signals, such as (Xaa-Asp-Glu-Leu)ₙ (SEQ ID NO. 1190) where Xaa is Lys or Arg, preferably Lys, and n is 1 to 6, preferably 1-3, at, preferably, the carboxy-terminus of the targeted agent (see, e.g., Seetharam et al. (1991) J. Biol. Chem. 266:17376-17381; and Buchner et al. (1992) Anal. Biochem. 205:263-270), that direct the targeted agent to the endoplasmic reticulum.

[0556] In other examples, the targeted agent can be modified to eliminate one or more cysteine residues, for example, to provide more predictable thiol conjugation at preferred locations. Care must be taken to avoid altering specificity of the resulting modified targeted agent, unless such alteration is desired. In all instances, particular modifications can be determined empirically.

[0557] The linker, L, attaches the antibody to the targeted agent through covalent bond(s). the linker can be a peptide or a non-peptide and can be selected to relieve or decrease steric hindrance caused by proximity of the targeted agent to the anti-EGFR antibody and/or to increase or alter other properties of the conjugate, such as the specificity, toxicity, solubility, serum stability and/or intracellular availability of the targeted moiety and/or to increase the flexibility of the linkage between the anti-EGFR antibody and the targeted agent.

[0558] When fusion proteins are contemplated, the linker is selected such that the resulting nucleic acid molecule encodes a fusion protein that binds to and is internalized by cells in a tumor microenvironment that express EGFR and all or a portion of the internalized protein preferably traffics to the cytoplasm. It also is contemplated that several linkers can be joined in order to employ the advantageous properties of each linker. In such instances, the linker portion of conjugate may contain more than 50 amino acid residues. The number of residues is not important as long as the resulting fusion protein binds to EGFR of the target cell and internalizes the linked targeted agent via a pathway that traffics the targeted agent to the cytoplasm and/or nucleus.

[0559] The targeted agent can be a protein, peptide, nucleic acid, small molecule, therapeutic moiety, or other agent in which targeted delivery to a selected population of tumor cells is desired. Such targeted agents include, but are not limited to, cytotoxic agents, DNA and RNA nucleases, toxins, drugs or other agents. Therapeutic moieties include, but are not limited to, cytotoxic moieties, radioisotopes, chemotherapeutic agents, lytic peptides and cytokines. Exemplary therapeutic moieties include, but are not limited to, among taxol; cytochalasin B; gramicidin D; ethidium bromide; emetine; mitomycin; etoposide; teniposide; vincristine; vinblastine; colchicine; doxorubicin; daunorubicin; dihydroxy anthracin dione; maytansine or an analog or derivative thereof; an auristatin or a functional peptide analog or derivative thereof; dolastatin 10 or 15 or an analog thereof; irinotecan or an analog thereof; mitoxantrone; mithramycin; actinomycin D; 1-dehydrotestosterone; a glucocorticoid; procaine; tetracaine; lidocaine; propranolol; puromycin; calicheamicin or an analog or derivative thereof; an antimetabolite; an alkylating agent; a platinum derivative; duocarmycin A, duocarmycin SA, rachelmycin (CC-1065), or an analog or derivative thereof; an antibiotic; pyrrolo[2,1-c][1,4]-benzodiazepine (PDB); a toxin; ribonuclease (RNase); DNase I, Staphylococcal enterotoxin A; and pokeweed antiviral protein.

[0560] Drugs also can be used as a targeted agent in these methods. Such drugs include 5-fluorouracil, vinca alkaloids, and antibiotics such as dactinomycin, bleomycin, daunorubicin, doxorubicin, idarubicin, methotrexate, mithramycin, mitomycin, mitoxantrone, plicamycin and anthramycin (AMC), neocarzinostatin (Takahashi et al. (1988) Cancer 61:881-888) and vindesine (Rowland et al., (1986) Cancer Immunol Immunother 21(3):183-187).

[0561] Toxins used in antibody-toxin conjugates include bacterial toxins such as diphtheria toxin, and active fragments thereof and hybrid molecules, plant toxins, such as ricin toxin (U.S. Pat. No. 4,753,894; U.S. Pat. No. 5,629,197; U.S. Pat. No. 4,958,009; U.S. Pat. No. 4,956,453), small molecule toxins such as geldanamycin (Mandler et al. (2000) J. Nat. Cancer Inst. 92(19):1573-1581; Mandler et al. (2000) Bioorg. Med. Chem. Lett. 10:1025-1028; Mandler et al. (2002) Bioconjug. Chem. 13:786-791), maytansinoids, such as DM1, DM3 and DM4 (EP 1391213; Chari (2008) Acc Chem Res 41:98-107; Liu et al., (1996) Proc. Natl. Acad. Sci. USA 93:8618-8623), and calicheamicin (Damle (2004) Expert Opin Biol Ther 4:1445-1452; Lode et al. (1998) Cancer Res. 58:2928; Hinman et al. (1993) Cancer Res. 53:3336-3342). Finally, the auristatin peptides, auristatin E (AE), monomethylauristatin E (MMAE), and monomethylauristatin F (MMAF), synthetic analogs of dolastatin can be employed (Doronin et al. (2003) Nature Biotechnology 21(7):778-784). Other toxins include cholera toxin, a Shiga-like toxin, LT toxin, C3 toxin, Shiga toxin, pertussis toxin, tetanus toxin, soybean Bowman-Birk protease inhibitor, Pseudomonas exotoxin, alorin, saporin, modeccin, galanin, abrin A chain, modeccin A chain, alpha-sarcin, Aleurites fordii proteins, dianthin proteins, Phytolacca americana proteins, momordica charantia inhibitor, curcin, crotin, gelonin, mitogillin, restrictocin, phenomycin, and enomycin toxins. The toxins can effect their cytotoxic and cytostatic effects by mechanisms including tubulin binding, DNA binding, or topoisomerase inhibition.

[0562] a. Targeted Agents

[0563] The targeted agent can be a protein, peptide, nucleic acid, small molecule, therapeutic moiety, or other agent in which targeted delivery to a selected population of tumor cells is desired. Such targeted agents include, but are not limited to, cytotoxic agents, DNA and RNA nucleases, toxins, drugs or other agents.

[0564] i. Maytansinoid Drug Moieties

[0565] Maytansinoid drug moieties are described in U.S. Pat. No. 8,142,784. Maytansine compounds inhibit cell proliferation by inhibiting the formation of microtubules during mitosis through inhibition of polymerization of the microtubule protein, tubulin (Remillard et al. (1975) Science 189:1002-1005; U.S. Pat. No. 5,208,020). Maytansine and maytansinoids are highly cytotoxic but their clinical use in cancer therapy has been greatly limited by their severe systemic side-effects primarily attributed to their poor selectivity for tumors. Clinical trials with maytansine had been discontinued due to serious adverse effects on the central nervous system and gastrointestinal system (Issel et al. (1978) Can. Treatment. Rev. 5:199-207).

[0566] Maytansinoid drug moieties are attractive drug moieties in antibody-drug conjugates because they are: (i) relatively accessible to prepare by fermentation or chemical modification, derivatization of fermentation products, (ii) amenable to derivatization with functional groups suitable for conjugation through the non-disulfide linkers to antibodies, (iii) stable in plasma, and (iv) effective against a variety of tumor cell lines.

[0567] Maytansine compounds suitable for use as maytansinoid drug moieties are well known in the art, and can be isolated from natural sources according to known methods, produced using genetic engineering techniques (see Yu et al. (2002) PNAS 99:7968-7973), or maytansinol and maytansinol analogues prepared synthetically according to known methods.

[0568] Exemplary maytansinoid drug moieties include those having a modified aromatic ring, such as: C-19-dechloro (U.S. Pat. No. 4,256,746) (prepared by lithium aluminum hydride reduction of ansamitocin P2); C-20-hydroxy (or C-20-demethyl)+/−C-19-dechloro (U.S. Pat. Nos. 4,361,650 and 4,307,016) (prepared by demethylation using Streptomyces or Actinomyces or dechlorination using LAH); and C-20-demethoxy, C-20-acyloxy (—OCOR), +/−dechloro (U.S. Pat. No. 4,294,757) (prepared by acylation using acyl chlorides). and those having modifications at other positions.

[0569] Exemplary maytansinoid drug moieties also include those having modifications such as: C-9-SH, prepared by the reaction of maytansinol with H₂S or P2S5 (U.S. Pat. No. 4,424,219); C-14-alkoxymethyl(demethoxy/CH₂OR) (U.S. Pat. No. 4,331,598); C-14-hydroxymethyl or acyloxymethyl (CH₂OH or CH₂OAc) prepared from Nocardia (U.S. Pat. No. 4,450,254); C-15-hydroxy/acyloxy, prepared by the conversion of maytansinol by Streptomyces (U.S. Pat. No. 4,364,866); C-15-methoxy, isolated from Trewia nudlflora (U.S. Pat. No. 4,313,946 and U.S. Pat. No. 4,315,929); C-18-N-demethyl, prepared by the demethylation of maytansinol by Streptomyces (U.S. Pat. No. 4,362,663 and U.S. Pat. No. 4,322,348); and 4,5-deoxy, prepared by the titanium trichloride/LAH reduction of maytansinol (U.S. Pat. No. 4,371,533).

[0570] Many positions on maytansine compounds are known to be useful as the linkage position, depending upon the type of link. For example, for forming an ester linkage, the C-3 position having a hydroxyl group, the C-14 position modified with hydroxymethyl, the C-15 position modified with a hydroxyl group and the C-20 position having a hydroxyl group are all suitable.

[0571] Maytansinoid drug moieties can be linked to an anti-EGFR antibody by direct conjugation or using any of the linkers provided herein. In particular examples, the cytotoxic or drug agent is mertansine, also known as DM1 (N₂¹-deacetyl-N₂′-(3-mercapto-1-oxopropyl)-maytansine). Mertansine can be linked via 4-mercaptovaleric acid. An emtansine conjugate also can be formed with the antibodies herein using the linker 4-(3-mercapto-2,5-dioxo-1-pyrrolidinylmethyl)-cylohexanecarboxylic acid (MCC).

[0572] ii. Auristatins and Dolastatins Drug Moieties

[0573] Auristatins and dolastatins are described in published U.S. Application No. US2011/0217321. Dolastatins and auristatins have been shown to interfere with microtubule dynamics, GTP hydrolysis, and nuclear and cellular division (Woyke et al. (2001) Antimicrob. Agents and Chemother. 45(12):3580-3584) and have anticancer (U.S. Pat. No. 5,663,149) and antifungal activity (Pettit et al. (1998) Antimicrob. Agents Chemother. 42:2961-2965). Further, auristatins are highly potent, synthetic, stable, and amenable to chemical modification to allow for linker attachment (Senter (2009) Curr Opin Chem Biol 12:1-10).

[0574] Because auristatins are synthetic, integral structural modifications can be made to significantly alter the properties of the parent drug. For example, monomethylauristatin F (MMAF) terminates with the amino acid residue phenylalanine, which impairs cell membrane permeability (Doronina et al., (2006) Bioconjug Chem. 17:114-124). Thus, conjugation of MMAF to an ADC can facilitate selective drug uptake by antigen-positive cells (Doronina et al., (2006) Bioconjug Chem. 17:114-124; Doronina et al., (2003) Nat Biotechnol. 21:778-784).

[0575] The dolastatin or auristatin drug moiety can be attached to antibodies through the N (amino) terminus or the C (carboxyl) terminus of the peptidic drug moiety (WO 2002/088172). Exemplary auristatin embodiments include N-terminally and C-terminally linked monomethylauristatin drug moieties MMAE and MMAF (Senter et al. (2004) “Proceedings of the American Association for Cancer Research,” Volume 45, Abstract Number 623, and presented Mar. 28, 2004; U.S. Publication No. 2011/0020343).

[0576] Dolastatin or auristatin can be linked to an anti-EGFR antibody by direct conjugation or using any of the linkers provided herein. In particular examples, dolastatin or auristatin can be linked to an anti-EGFR antibody with a peptide linker, such as valine-citrulline (Val-Cit).

[0577] iii. Cell Toxin Moieties

[0578] Cell toxins suitable for use the in the methods and compositions include small molecules, such as DNA cleaving agents, and proteinaceous cell toxins, including, but are not limited to, bacterial, fungal, plant, insect, snake and spider toxins. Amino acid sequences of exemplary cell toxins contemplated for incorporation in the conjugates provided herein are set forth in Table 11.

TABLE 11
Exemplary Amino Acid Sequences of Toxins

| Toxin | Sequence | SEQ ID |
|---|---|---|
| Bryodin | DVSFRLSGATTTSYGVFIKNLREALPYERKVYNIPLLRSSISGRYTL | 1202 |
| | LHLTNYADETISVAVDVTNVYIMGYLAGDVSYFFNEASATEAAK | |
| | FVFKDAKKKVTLPYSGNYERLQTAAGKIRENIPLGLPALDSAITTL | |
| | YYYTASSAASALLVLIQSTAESARYKFIEQQIGKRVDKTFLPSLATI | |
| | SLENNWSALSKQIQIASTNNGQFESPVVLIDGNNQRVSITNASARV | |
| | VTSNIALLLNRNNIA | |
| Saporin-6 | VTSITLDLVNPTAGQYSSFVDKIRNNVKDPNLKYGGTDIAVIPPSK | 1203 |
| | EKFLRINFQSSRGTVSLGLKRDNLYVVAYLAMDNTNVNRAYYFR | |
| | SEITSAESTALFPEATTANQKALEYTEDYQSIEKNAQITQGDQSRK | |
| | ELGLGIDLLSTSMEAVNKKARVVKDEARFLLIAIQMTAEAARFRY | |
| | IQNLVIKNFPNKFNSENKVIQFEVNWKKISTAIYGDAKNGVFNKD | |
| | YDFGFGKVRQVKDLQMGLLMYLGKPKSSNEANSTVRHYGPLKP | |
| | TLLIT | |
| Anti-Viral | APTLETIASLDLNNPTTYLSFITNIRTKVADKTEQCTIQKISKTFTQR | 1204 |
| Protein MAP | YSYIDLIVSSTQKITLAIDMADLYVLGYSDIANNKGRAFFFKDVTE | |
| | AVANNFFPGATGTNRIKLTFTGSYGDLEKNGGLRKDNPLGIFRLE | |
| | NSIVNIYGKAGDVKKQAKFFLLAIQMVSEAARFKYISDKIPSEKYE | |
| | EVTVDEYMTALENNWAKLSTAVYNSKPSTTTATKCQLATSPVTIS | |
| | PWIFKTVEEIKLVMGLLKSS | |
| Shiga Toxin | KEFTLDFSTAKTYVDSLNVIRSAIGTPLQTISSGGTSLLMIDSGTGD | 1205 |
| A-Chain | NLFAVDVRGIDPEEGRFNNLRLIVERNNLYVTGFVNRTNNVFYRF | |
| | ADFSHVTFPGTTAVTLSGDSSYTTLQRVAGISRTGMQINRHSLTTS | |
| | YLDLMSHSGTSLTQSVARAMLRFVTVTAEALRFRQIQRGFRTTLD | |
| | DLSGRSYVMTAEDVDLTLNWGRLSSVLPDYHGQDSVRVGRISFG | |
| | SINAILGSVALILNCHHHASRVARMASDEFPSMCPADGRVRGITH | |
| | NKILWDSSTLGAILMRRTISS | |
| Shiga-Like | MKCILFKWVLCLLLGFSSVSYSREFTIDFSTQQSYVSSLNSIRTEIST | 1206 |
| Toxin | PLEHISQGTTSVSVINHTPPGSYFAVDIRGLDVYQARFDHLRLIIEQ | |
| Subunit A | NNLYVAGFVNTATNTFYRFSDFTHISVPGVTTVSMTTDSSYTTLQ | |
| (Verotoxin 2) | RVAALERSGMQISRHSLVSSYLALMEFSGNTMTRDASRAVLRFVT | |
| | VTAEALRFRQIQREFRQALSETAPVYTMTPGDVDLTLNWGRISNV | |
| | LPEYRGEDGVRVGRISFNNISAILGTVAVILNCHHQGARSVRAVN | |
| | EESQPECQITGDRPVIKINNTLWESNTAAAFLNRKSQFLYTTGK | |
| Trichosanthin | DVSFRLSGATSSSYGVFISNLRKALPNERKLYDIPLLRSSLPGSQRY | 1207 |
| | ALIHLTNYADETISVAIDVTNVYIMGYRAGDTSYFFNEASATEAA | |
| | KYVFKDAMRKVTLPYSGNYERLQTAAGKIRENIPLGLPALDSAIT | |
| | TLFYYNANSAASALMVLIQSTSEAARYKFIEQQIGKRVDKTFLPSL | |
| | AIISLENSWSALSKQIQIASTNNGQFESPVVLINAQNQRVTITNVDA | |
| | GVVTSNIALLLNRNNMA | |

[0579] (a) DNA Cleaving Agents

[0580] Examples of DNA cleaving agents suitable for inclusion as the cell toxin in the chimeric ligand-toxin used in practicing the methods include, but are not limited to, anthraquinone-oligopyrrol-carboxamide, benzimidazole, leinamycin; dynemycin A; enediyne; as well as biologically active analogs or derivatives thereof (i.e., those having a substantially equivalent biological activity). Known analogs and derivatives are disclosed, for examples in Islam et al., J. Med. Chem. 34 2954-61, 1991; Skibo et al., J. Med. Chem. 37:78-92, 1994; Behroozi et al., Biochemistry 35:1568-74, 1996; Helissey et al., Anticancer Drug Res. 11:527-51, 1996; Unno et al., Chem. Pharm. Bull. 45:125-33, 1997; Unno et al., Bioorg. Med. Chem., 5:903-19, 1997; Unno et al., Bioorg. Med. Chem., 5: 883-901, 1997; and Xu et al., Biochemistry 37:1890-7, 1998). Other examples include, but are not limited to, endiyne quinone imines (U.S. Pat. No. 5,622,958); 2,2r-bis(2-aminoethyl)-4-4′-bithiazole (Lee et al., Biochem. Mol. Biol. Int. 40:151-7, 1996); epilliticine-salen.copper conjugates (Routier et al., Bioconjug. Chem., 8: 789-92, 1997).

[0581] (b) Antimetabolites

[0582] Examples of antimetabolites useful for inclusion as the cell toxin in the chimeric ligand-toxin include, but are not limited to, 5-fluorouracil, methotrexate, melphalan, daunomycin, doxorubicin, nitrogen mustard and mitomycin c.

[0583] (c) Proteinaceous Cell Toxins

[0584] Examples of proteinaceous cell toxins useful for incorporation into the chimeric ligand-toxins used in the methods include, but are not limited to, type one and type two ribosome inactivating proteins (RIP). Useful type one plant RIPs include, but are not limited to, dianthin 30, dianthin 32, lychnin, saporins 1-9, pokeweed activated protein (PAP), PAP II, PAP-R, PAP-S, PAP-C, mapalmin, dodecandrin, bryodin-L, bryodin, Colicin 1 and 2, luffin-A, luffin-B, luffin-S, 19K-protein synthesis inhibitory protein (PSI), 15K-PSI, 9K-PSI, alpha-kirilowin, beta-kirilowin, gelonin, momordin, momordin-II, momordin-Ic, MAP-30, alpha-momorcharin, beta-momorcharin, trichosanthin, TAP-29, trichokirin; barley RIP; flax RIP, tritin, corn RIP, Asparin 1 and 2 (Stirpe et al., Bio/Technology 10:405-12, 1992). Useful type two RIPs include, but are not limited to, volkensin, ricin, nigrin-b, CIP-29, abrin, modeccin, ebulitin-α, ebulitin-β, ebultin-γ, vircumin, porrectin, as well as the biologically active enzymatic subunits thereof (Stirpe et al., Bio/Technology 10:405-12, 1992; Pastan et al., Annu. Rev. Biochem. 61:331-54; Brinkmann and Pastan, Biochim. et Biophys. Acta 1198:27-45, 1994; and Sandvig and Van Deurs, Physiol. Rev. 76:949-66, 1996).

[0585] (d) Bacterial Toxins

[0586] Examples of bacterial toxins useful as cell toxins include, but are not limited to, shiga toxin and shiga-like toxins (i.e., toxins that have the same activity or structure), as well as the catalytic subunits and biologically functional fragments thereof. These bacterial toxins also are type two RIPs (Sandvig and Van Deurs, Physiol. Rev. 76:949-66, 1996; Armstrong, J. Infect. Dis., 171:1042-5, 1995; Kim et al., Microbiol. Immunol. 41:805-8, 1997, and Skinner et al., Microb. Pathog. 24:117-22, 1998). Additional examples of useful bacterial toxins include, but are not limited to, Pseudomonas exotoxin and Diphtheria toxin (Pastan et al., Annu. Rev. Biochem. 61:331-54; and Brinkmann and Pastan, Biochim. et Biophys. Acta 1198:27-45, 1994). Truncated forms and mutants of the toxin enzymatic subunits also can be used as a cell toxin moiety (Pastan et al., Annu. Rev. Biochem. 61:331-54; Brinkmann and Pastan, Biochim. et Biophys. Acta 1198:27-45, 1994; Mesri et al., J. Biol. Chem. 268:4852-62, 1993; Skinner et al., Microb. Pathog. 24:117-22, 1998; and U.S. Pat. No. 5,082,927). Other targeted agents include, but are not limited to the more then 34 described Colicin family of RNase toxins which include colicins A, B, D, E1-9, cloacin DF13 and the fungal RNase, α-sarcin (Ogawa et al. Science 283: 2097-100, 1999; Smarda et al., Folia Microbiol (Praha) 43:563-82, 1998; Wool et al., Trends Biochem. Sci., 17: 266-69, 1992).

[0587] (e) Porphyrins and Other Light Activated Toxins

[0588] Porphyrins are well known light activatable toxins that can be readily cross-linked to proteins (see, e.g., U.S. Pat. No. 5,257,970; U.S. Pat. No. 5,252,720; U.S. Pat. No. 5,238,940; U.S. Pat. No. 5,192,788; U.S. Pat. No. 5,171,749; U.S. Pat. No. 5,149,708; U.S. Pat. No. 5,202,317; U.S. Pat. No. 5,217,966; U.S. Pat. No. 5,053,423; U.S. Pat. No. 5,109,016; U.S. Pat. No. 5,087,636; U.S. Pat. No. 5,028,594; U.S. Pat. No. 5,093,349; U.S. Pat. No. 4,968,715; U.S. Pat. No. 4,920,143 and International Application WO 93/02192).

[0589] iv. Nucleic Acids for Targeted Delivery

[0590] The conjugates provided herein also can be used to deliver nucleic acids to targeted cells. The nucleic acids include DNA intended to modify the genome of a cell and thereby effect genetic therapy, and DNA and RNA for use as antisense agents. The nucleic acids include antisense RNA, DNA, ribozymes and other oligonucleotides that are intended to be used as antisense agents. The nucleic acids can also include RNA trafficking signals, such as viral packaging sequences (see, e.g., Sullenger et al. (1994) Science 262:1566-1569). The nucleic acids also include DNA molecules that encode intact genes or that encode proteins intended to be used in gene therapy.

[0591] DNA (or RNA) that may be delivered to a cell to effect genetic therapy includes DNA that encodes tumor-specific cytotoxic molecules, such as tumor necrosis factor, viral antigens and other proteins to render a cell susceptible to anti-cancer agents, and DNA encoding genes, such as the defective gene (CFTR) associated with cystic fibrosis (see, e.g., International Application WO 93/03709, which is based on U.S. application Ser. No. 07/745,900; and Riordan et al. (1989) Science 245:1066-1073), to replace defective genes.

[0592] Nucleic acids and oligonucleotides for use as described herein can be synthesized by any method known to those of skill in this art (see, e.g., WO 93/01286, which is based on U.S. application Ser. No. 07/723,454; U.S. Pat. No. 5,218,088; U.S. Pat. No. 5,175,269; U.S. Pat. No. 5,109,124). Identification of oligonucleotides and ribozymes for use as antisense agents is well within the skill in this art. Selection of DNA encoding genes for targeted delivery for genetic therapy also is well within the level of skill of those in this art. For example, the desirable properties, lengths and other characteristics of such oligonucleotides are well known. Antisense oligonucleotides are designed to resist degradation by endogenous nucleolytic enzymes and include, but are not limited to: phosphorothioate, methylphosphonate, sulfone, sulfate, ketyl, phosphorodithioate, phosphoramidate, phosphate esters, and other such linkages (see, e.g., Agrawal et al. (1987) Tetrehedron Lett. 28:3539-3542; Miller et al. (1971) J. Am. Chem. Soc. 93:6657-6665; Stec et al. (1985) Tetrehedron Lett. 26:2191-2194; Moody et al. (1989) Nucl. Acids Res. 17:4769-4782; Letsinger et al. (1984) Tetrahedron 40:137-143; Eckstein (1985) Annu. Rev. Biochem. 54:367-402; Eckstein (1989) Trends Biol. Sci. 14:97-100; Stein (1989) In: Oligodeoxynucleotides. Antisense Inhibitors of Gene Expression, Cohen, ed, Macmillan Press, London, pp. 97-117; Jager et al. (1988) Biochemistry 27:7237-7246).

[0593] (a) Antisense Nucleotides, Including: Antisense Oligonucleotides; Triplex Molecules; Dumbbell Oligonucleotides; DNA; Extracellular Protein Binding Oligonucleotides; and Small Nucleotide Molecules

[0594] Antisense nucleotides are oligonucleotides that specifically bind to mRNA that has complementary sequences, thereby preventing translation of the mRNA (see, e.g., U.S. Pat. No. 5,168,053 to Altman et al. U.S. Pat. No. 5,190,931 to Inouye, U.S. Pat. No. 5,135,917 to Burch; U.S. Pat. No. 5,087,617 to Smith and Clusel et al. (1993) Nucl. Acids Res. 21:3405-3411, which describes dumbbell antisense oligonucleotides). Triplex molecules refer to single DNA strands that target duplex DNA and thereby prevent transcription (see, e.g., U.S. Pat. No. 5,176,996 to Hogan et al. which describes methods for making synthetic oligonucleotides that bind to target sites on duplex DNA).

[0595] (b) Ribozymes

[0596] Ribozymes are RNA constructs that specifically cleave messenger RNA. There are at least five classes of ribozymes that are known that are involved in the cleavage and/or ligation of RNA chains. Ribozymes can be targeted to any RNA transcript and can catalytically cleave such transcript (see, e.g., U.S. Pat. No. 5,272,262; U.S. Pat. No. 5,144,019; and U.S. Pat. Nos. 5,168,053, 5,180,818, 5,116,742 and 5,093,246 to Cech et al. which described ribozymes and methods for production thereof). Any such ribosome may be linked to a conditionally active anti-EGFR antibody for delivery to EGFR bearing cells under acidic conditions.

[0597] The ribozymes may be delivered to the targeted cells as DNA encoding the ribozyme linked to a eukaryotic promoter, such as a eukaryotic viral promoter, generally a late promoter, such that upon introduction into the nucleus, the ribozyme will be directly transcribed. In such instances, the construct will also include a nuclear translocation sequence, generally as part of the targeting agent or as part of a linker in order to render it form suitable for delivering linked nucleic acids to the nucleus.

[0598] (c) Nucleic Acids Encoding Therapeutic Products for Targeted Delivery

[0599] Among the DNA that encodes therapeutic products contemplated for use is DNA encoding correct copies anticancer agents, such as tumor necrosis factors, and cytotoxic agents, such as shiga A1 toxin or saporin to EGFR bearing tumor cells. The conjugate should include a nuclear translocation sequence (NTS). If the conjugate is designed such that the targeting agent and linked DNA is cleaved in the cytoplasm, then the NTS should be included in a portion of the linker that remains bound to the DNA, so that, upon internalization, the conjugate will be trafficked to the nucleus. The nuclear translocation sequence (NTS) may be a heterologous sequence or a may be derived from the selected chemokine receptor targeting agent. A typical consensus NTS sequence contains an amino-terminal proline or glycine followed by at least three basic residues in an array of seven to nine amino acids (see, e.g., Dang et al. (1989) J. Biol. Chem. 264:18019-18023, Dang et al. (1988) Mol. Cell. Biol. 8:4048-4058).

[0600] (d) Coupling of Nucleic Acids to Proteins

[0601] To effect chemical conjugation herein, the targeting agent is linked to the nucleic acid either directly or via one or more linkers. Methods for conjugating nucleic acids, at the 5′ ends, 3′ ends and elsewhere, to the amino and carboxyl termini and other sites in proteins are known to those of skill in the art (for a review see e.g., Goodchild, (1993) In: Perspectives in Bioconjugate Chemistry, Mears, Ed., American Chemical Society, Washington, D.C. pp. 77-99). For example, proteins have been linked to nucleic acids using ultraviolet irradiation (Sperling et al. (1978) Nucleic Acids Res. 5:2755-2773; Fiser et al. (1975) FEBS Lett. 52:281-283), bifunctional chemicals (Bäumert et al. (1978) Eur. J. Biochem. 89:353-359; and Oste et al. (1979) Mol. Gen. Genet. 168:81-86) photochemical cross-linking (Vanin et al. (1981) FEBS Lett. 124:89-92; Rinke et al. (1980) J. Mol. Biol. 137:301-314; Millon et al. (1980) Eur. J. Biochem. 110:485-454).

[0602] In particular, the reagents (N-acetyl-N′-(p-glyoxylylbenzolyl)cystamine and 2-iminothiolane have been used to couple DNA to proteins, such as α₂macroglobulin (α₂M) via mixed disulfide formation (see, Cheng et al. (1983) Nucleic Acids Res. 11:659-669). N-acetyl-N′-(p-glyoxylylbenzolyl)cystamine reacts specifically with non-paired guanine residues and, upon reduction, generates a free sulfhydryl group. 2-Iminothiolane reacts with proteins to generate sulfhydryl groups that are then conjugated to the derivatized DNA by an intermolecular disulfide interchange reaction. Any linkage may be used provided that, upon internalization of the conjugate the targeted nucleic acid is active. Thus, it is expected that cleavage of the linkage may be necessary, although it is contemplated that for some reagents, such as DNA encoding ribozymes linked to promoters or DNA encoding therapeutic agents for delivery to the nucleus, such cleavage may not be necessary.

[0603] Thiol linkages readily can be formed using heterobifunctional reagents. Amines have also been attached to the terminal 5′ phosphate of unprotected oligonucleotides or nucleic acids in aqueous solutions by reacting the nucleic acid with a water-soluble carbodiimide, such as 1-ethyl-3,3-dimethylaminopropyl]carbodiimide (EDC) or N-ethyl-N′(3-dimethylaminopropylcarbodiimidehydrochloride (EDCI), in imidazole buffer at pH 6 to produce the 5′ phosphorimidazolide. Contacting the 5′ phosphorimidazolide with amine-containing molecules and ethylenediamine, results in stable phosphoramidates (see, e.g., Chu et al. (1983) Nucleic Acids Res. 11:6513-6529; and WO 88/05077 in which the U.S. is designated). In particular, a solution of DNA is saturated with EDC, at pH 6 and incubated with agitation at 4° C. overnight. The resulting solution is then buffered to pH 8.5 by adding, for example about 3 volutes of 100 mM citrate buffer, and adding about 5 μg-about 20 μg of a chemokine receptor targeting agent, and agitating the resulting mixture at 4° C. for about 48 hours. The unreacted protein may be removed from the mixture by column chromatography using, for example, SEPHADEX G75 (Pharmacia) using 0.1 M ammonium carbonate solution, pH 7.0 as an eluting buffer. The isolated conjugate may be lyophilized and stored until used.

[0604] U.S. Pat. No. 5,237,016 provides methods for preparing nucleotides that are bromacetylated at their 5′ termini and reacting the resulting oligonucleotides with thiol groups. Oligonucleotides derivatized at their 5′-termini bromoacetyl groups can be prepared by reacting 5′-aminohexyl-phosphoramidate oligonucleotides with bromoacetic acid-N-hydroxysuccinimide ester as described in U.S. Pat. No. 5,237,016. U.S. Pat. No. 5,237,016 also describes methods for preparing thiol-derivatized nucleotides, which can then be reacted with thiol groups on the selected growth factor. Briefly, thiol-derivatized nucleotides are prepared using a 5′-phosphorylated nucleotide in two steps: (1) reaction of the phosphate group with imidazole in the presence of a diimide and displacement of the imidazole leaving group with cystamine in one reaction step; and reduction of the disulfide bond of the cystamine linker with dithiothreitol (see, also, Chu et al. (1988) Nucl. Acids Res. 16:5671-5691, which describes a similar procedure). The 5′-phosphorylated starting oligonucleotides can be prepared by methods known to those of skill in the art (see, e.g., Maniatis et al. (1982) Molecular Cloning: A Laboratory Manual, Cold Spring Harbor Laboratory, New York, p. 122).

[0605] The antisense oligomer or nucleic acid, such as a methylphosphonate oligonucleotide (MP-oligomer), may be derivatized by reaction with SPDP or SMPB. The resulting MP-oligomer may be purified by HPLC and then coupled to the chemokine receptor targeting agent. The MP-oligomer (about 0.1 μM) is dissolved in about 40-50 μl of 1:1 acetonitrile/water to which phosphate buffer (pH 7.5, final concentration 0.1 M) and a 1 mg MP-oligomer in about 1 ml phosphate buffered saline is added. The reaction is allowed to proceed for about 5-10 hours at room temperature and is then quenched with about 15 μL 0.1 iodoacetamide. The conjugates can be purified on heparin sepharose Hi Trap columns (1 ml, Pharmacia) and eluted with a linear or step gradient. The conjugate should elute in 0.6 M NaCl.

[0606] b. Linkers

[0607] The linker, L, attaches the antibody to a targeted agent through covalent bond(s). The linker is a bifunctional or multifunctional moiety which can be used to link one or more targeted agent(s) to the anti-EGFR antibody to form an antibody-drug conjugate (ADC). ADCs can be readily prepared using a linker having reactive functionality for binding to the targeted agent and to the anti-EGFR antibody. A cysteine thiol group, or an amine group, e.g., N-terminus or lysine side chain, of the anti-EGFR antibody can form a bond with a functional group of a linker reagent, targeted agent or targeted agent-linker reagent.

[0608] Linkers are preferably stable in the extracellular environment so that the antibody-drug conjugate (ADC) is stable and remains intact, i.e., the antibody remains linked to the targeted agent, before transport or delivery into the target cell. Thus, the linkers are stable outside the target cell and may be cleaved or enable dissociation of the antibody and targeted agent at some efficacious rate once inside the cell. Contemplated linkers will (i) not interfere with the specific binding properties of the antibody; (ii) permit intracellular delivery of the conjugate or targeted agent; (iii) remain stable and intact, i.e., not cleaved, until the conjugate has been delivered or transported to its targeted site; and (iv) not interfere with the cytotoxic, cell-killing effect or a cytostatic effect of the targeted agent. Stability of the ADC may be measured by standard analytical techniques such as mass spectrometry and/or HPLC.

[0609] Linkers have two reactive functional groups to permit covalent attachment to both the antibody and the targeted agent, and thus exhibit bivalency in a reactive sense. Such chemical cross-linking reagents, which are useful for attaching two or more functional or biologically active moieties, such as peptides, nucleic acids, drugs, toxins, antibodies, haptens, and reporter groups, are known, and methods have been described for their use in generating conjugates (Hermanson, G. T. (1996) Bioconjugate Techniques; Academic Press: New York, p 234-242).

[0610] In some examples, a linker has a reactive functional group which has a nucleophilic group that is reactive to an electrophilic group present on an antibody. Useful electrophilic groups on an antibody include, but are not limited to, aldehyde and ketone carbonyl groups. The heteroatom of a nucleophilic group of a linker can react with an electrophilic group on an antibody and form a covalent bond to an antibody unit. Useful nucleophilic groups on a linker include, but are not limited to, hydrazide, oxime, amino, hydrazine, thiosemicarbazone, hydrazine carboxylate, and arylhydrazide. The electrophilic group on an antibody provides a convenient site for attachment to a linker.

[0611] i. Peptide Linkers

[0612] Linkers can be peptidic, comprising one or more amino acid units. Peptide linker reagents may be prepared by solid phase or liquid phase synthesis methods (E. Schroder and K. Lubke, The Peptides, volume 1, pp 76-136 (1965) Academic Press) that are well known in the field of peptide chemistry, including t-BOC chemistry (Geiser et al. “Automation of solid-phase peptide synthesis” in Macromolecular Sequencing and Synthesis, Alan R. Liss, Inc., 1988, pp. 199-218) and Fmoc/HBTU chemistry (Fields, G. and Noble, R. (1990) “Solid phase peptide synthesis utilizing 9-fluoroenylmethoxycarbonyl amino acids”, Int. J. Peptide Protein Res. 35:161-214), on an automated synthesizer such as the Rainin Symphony Peptide Synthesizer (Protein Technologies, Inc.), or Model 433 (Applied Biosystems). Peptide-based linkers offer advantages over linkers that are hydrolytically or reductively labile, since proteolysis is enzymatic, and the enzymes can be selected for preferential expression within tumor cells. The cathepsin B-cleavable peptide linker, valine-citrulline (Val-Cit), and modifications thereof such as maleimidocaproyl-valine-citrulline (mc-vc), phenylalanine-lysine, Ala-Leu-Ala-Ala (SEQ ID NO: 1201), other tri/tetrapeptides are exemplary peptide linkers that have been employed in ADCs (Dosio et al., (2010) Toxins 3:848-883; Doronina et al., (2006) Bioconjug Chem. 17:114-124; Doronina et al., (2003) Nat Biotechnol. 21:778-784; Sanderson et al., (2005) Clin Cancer Res 11:843-8521; Durcy and Stump (2010) Bioconjub Chem. 21:5-13). Exemplary non-cleavable peptide linkers include N-methyl-valine-citrulline. Other peptide linkers are described in U.S. Publication No. 2011/0020343.

[0613] Preferred peptide linkers are those that can be incorporated in fusion proteins and expressed in a host cell, such as E. coli. Such linkers include: enzyme substrates, such as cathepsin B substrate, cathepsin D substrate, trypsin substrate, thrombin substrate, subtilisin substrate, Factor Xa substrate, and enterokinase substrate; linkers that increase solubility, flexibility, and/or intracellular cleavability include linkers, such as (glyₘser)ₙ and (serₘgly)ₙ, where m is 1 to 6, preferably 1 to 4, more preferably 2 to 4, and n is 1 to 6, preferably 1 to 4, more preferably 2 to 4 (see, e.g., International PCT application No. WO 96/06641, which provides exemplary linkers for use in conjugates). In some embodiments, several linkers may be included in order to take advantage of desired properties of each linker.

[0614] ii. Chemical Linkers

[0615] ADCs also can be prepared using linkers that are non-cleavable moieties or chemical cross-linking reagents. Exemplary non-cleavable linkers include amide linkers and amide and ester linkages with succinate spacers (Dosio et al., (2010) Toxins 3:848-883). Exemplary chemical cross-linking linkers include, but are not limited to, SMCC (Succinimidyl-4-(N-maleimidomethyl)cyclohexane-1-carboxylate) and SIAB (Succinimidyl (4-iodoacetyl)aminobenzoate). SMCC is a an amine-to-sulfhydryl crosslinker that contains NHS-ester and maleimide reactive groups at opposite ends of a medium-length cyclohexane-stabilized spacer arm. SIAB is a short, NHS-ester and iodoacetyl crosslinker for amine-to-sulfhydryl conjugation. Other exemplary cross-linking reagents include, but are not limited to, thioether linkers, chemically labile hydrazone linkers, 4-mercaptovaleric acid, BMPEO, BMPS, EMCS, GMBS, HBVS, LC-SMCC, MBS, MPBH, SBAP, SIA, SMPB, SMPH, sulfo-EMCS, sulfo-GMBS, sulfo-KMUS, sulfo-MBS, sulfo-SIAB, sulfo-SMCC, and sulfo-SMPB, and SVSB (succinimidyl-(4-vinylsulfone)benzoate), and bis-maleimide reagents, such as DTME, BMB, BMDB, BMH, BMOE, BM(PEO)₃, and BM(PEO)₄, which are commercially available (Pierce Biotechnology, Inc.) Bis-maleimide reagents allow the attachment of a free thiol group of a cysteine residue of an antibody to a thiol-containing targeted agent, or linker intermediate, in a sequential or concurrent fashion. Other thiol-reactive functional groups besides maleimide, include iodoacetamide, bromoacetamide, vinyl pyridine, disulfide, pyridyl disulfide, isocyanate, and isothiocyanate. Other exemplary linkers and methods of use are described in U.S. Publication No. 2005/0276812 and Durcy and Stump (2010) Bioconjub Chem. 21:5-13.

[0616] Linkers optionally can be substituted with groups which modulated solubility or reactivity. For example, a sulfonate substituent may increase water solubility of the reagent and facilitate the coupling reaction of the linker reagent with the antibody or the drug moiety, or facilitate the coupling reaction of the anti-EGFR Ab-L with the targeted agent, or targeted agent-L with the anti-EGFR Ab, depending on the synthetic route employed to prepare the ADC.

[0617] Other linker reagents can also be obtained via commercial sources, such as Molecular Biosciences Inc. (Boulder, Colo.), or synthesized in accordance with procedures described in Toki et al. (2002) J. Org. Chem. 67:1866-1872; U.S. Pat. No. 6,214,345; WO 02/088172; U.S. 2003130189; U.S. 2003096743; WO 03/026577; WO 03/043583; and WO 04/032828. For example, linker reagents such as DOTA-maleimide (4-maleimidobutyramidobenzyl-DOTA) can be prepared by the reaction of aminobenzyl-DOTA with 4-maleimidobutyric acid (Fluka) activated with isopropylchloroformate (Aldrich), following the procedure of Axworthy et al. (2000) Proc. Natl. Acad. Sci. USA 97(4):1802-1807). DOTA-maleimide reagents react with the free cysteine amino acids of the cysteine engineered antibodies and provide a metal complexing ligand on the antibody (Lewis et al. (1998) Bioconj. Chem. 9:72-86). Chelating linker labelling reagents such as DOTA-NHS (1,4,7,10-tetraazacyclododecane-1,4,7,10-tetraacetic acid mono (N-hydroxysuccinimide ester) are commercially available (Macrocyclics, Dallas, Tex.).

[0618] The Linker may be a dendritic type linker for covalent attachment of more than one drug moiety through a branching, multifunctional linker moiety to an antibody (Sun et al. (2002) Bioorganic & Medicinal Chemistry Letters 12:2213-2215; Sun et al. (2003) Bioorganic & Medicinal Chemistry 11:1761-1768; King et al. (2002) Tetrahedron Letters 43:1987-1990). Dendritic linkers can increase the molar ratio of targeted agent to antibody, i.e., loading, which can increase the potency of the ADC. Thus, where an antibody bears only one reactive cysteine thiol group, a multitude of drug moieties may be attached through a dendritic linker. Exemplary dendritic linker reagents are described in U.S. Patent Publication No. 2005/0276812.

### D. METHODS FOR IDENTIFYING AND ASSESSING ANTI-EGFR ANTIBODY PROPERTIES AND ACTIVITIES

[0619] Anti-EGFR antibodies provided herein are selected based on exhibiting selective, and hence conditional, activity in a tumor microenvironment compared to a non-tumor microenvironment. Such antibodies can be identified by screening methods or other methods that compare the activity of an antibody or a collection of antibodies under two different conditions that simulate or reflect conditions that exist in a tumor microenvironment or non-tumor microenvironment. Identified antibodies, or antigen-binding fragments thereof, can be further characterized in a variety of assays known to one of skill in the art to assess clinical properties such as, for example, therapeutic efficacy, affinity for EGFR, toxicity, side effects, pharmacokinetics and pharmacodynamics.

[0620] As described herein, the differences in conditions that characterize solid tumors, such as low pH and hypoxia, can be leveraged to provide antibodies that are more active in the diseased microenvironment of the tumor. In performing such assays or methods, it is also found that the concentration of other proteins is a condition that affects or influences selection and conditional activity, and hence it is a parameter used in the screening assays. For example, as shown in Example 4, compared to the absence of added protein, the presence of added protein increases the ratio of activity or conditional activity of selected antibodies and this difference is greater at physiological concentrations of protein (e.g. 25% human serum). In an in vivo or physiological environment, the interstitial protein concentration (such as albumin) is anywhere from 20-50% of plasma. Serum contains about 60-80 g/L protein, and various tissues have been demonstrated to contain 12 mg/mL to 40 mg/mL interstitial protein (see e.g. Aukland and Reed (1993) Physiological Reviews, 73:1-78). Hence, in order to simulate these environments, assays and methods to select or characterize anti-EGFR antibodies are performed in the presence of 10 mg/mL to 50 mg/mL protein, which, for example, can be provided in serum, such as human serum, or as a serum albumin, such as human serum albumin, or other protein that does not interact with the antibody or receptor or otherwise directly alters antibody-receptor interactions. In some examples, assays and methods to select or characterize anti-EGFR antibodies are performed in the presence 12-40 mg/mL protein, such as at least 12 mg/mL, 15 mg/mL, 20 mg/mL, 25 mg/mL, 30 mg/mL, 35 mg/mL or 40 mg/mL protein. In other examples, the protein is provided in serum, and assays and methods to select or characterize anti-EGFR antibodies are performed in the presence of 20% to 50% serum (vol/vol), such as 20% to 50% human serum, such as at least 20%, 25%, 30%, 35%, 40%, 45% or 50% serum (vol/vol).

[0621] In particular, the conditional activity of an anti-EGFR can be determined by performing an assay in a dual format, whereby each assay is performed twice, under different conditions, such as different pH and/or lactate concentrations, and in the presence of physiological concentrations of total protein. Thus, methods of assessing or selecting anti-EGFR antibodies that are conditionally active in a tumor microenvironment include any assay or method that assesses an activity under a first set of conditions (e.g. conditions that exist in a tumor microenvironment) that includes 20-50% serum (vol/vol) or 10-50 mg/mL protein (e.g. serum albumin), and an acidic pH of about between 5.8 to 6.8 and/or elevated lactate levels of 10 mM to 20 mM. For example, the first set of conditions can include at least 25% serum (vol/vol) or 12-40 mg/mL protein (e.g. serum albumin), and an acidic pH of about between 6.0 to 6.5 and/or elevated lactate levels of 15 mM to 20 mM. In such methods, the anti-EGFR antibody also is assessed for activity under a second set of conditions that includes 20-50% serum (vol/vol) or 10-50 mg/mL protein (e.g. serum albumin), and near neutral pH or neutral pH of about between 7.0 to 7.4 and/or a lactate concentration of 0.5 to 5 mM. For example, the second set of conditions includes at least 25% serum (vol/vol) or 12-40 mg/mL protein (e.g. serum albumin), and pH about between 7.0 to 7.2 and/or lactate concentration of 1 mM to 4 mM. In such examples, the amount of added protein to simulate a physiologic environment (e.g. serum protein) is typically the same or substantially the same for both sets of conditions, but can vary by ±25% or less from one condition to the other.

[0622] Anti-EGFR antibodies, or antigen-binding fragments thereof, that exhibit greater activity under the first set of conditions compared to under the second set of conditions are selected as anti-EGFR antibodies that are conditionally active or selective for a tumor microenvironment. For example, anti-EGFR antibodies, or antigen-binding fragments thereof, are selected that exhibit a ratio of activity under the first set of conditions compared to the second set of conditions of at least 1.1, 1.2, 1.3, 1.4, 1.5, 1.6, 1.7, 1.8, 1.9, 2.0, 2.5, 3.0, 4.0, 5.0, 6.0, 7.0, 8.0, 9.0, 10.0, 15.0, 20.0, 25.0, 30.0, 35.0, 40.0, 45.0, 50.0 or more. Typically, for use as a selective therapeutic for a tumor microenvironment, the anti-EGFR antibody, or antigen-binding fragment thereof, is one that exhibits at least a ratio of activity under the first set of conditions (e.g. conditions that exist in a tumor microenvironment) compared to the second set of conditions (e.g. conditions that exist in a non-tumor microenvironment) of at least 3.0 or more.

[0623] Anti-EGFR antibodies specific for EGFR that can be screened and/or assessed for conditional activity in a tumor microenvironment as described herein include any antibody that is specific for EGFR. Such antibodies can be made using hybridoma methods, for example, by immunizing an appropriate host animal or immunizing lymphocytes in vitro with a followed by fusion with myeloma cells to produce hybridomas (e.g. Kohler et al. (1975) Nature, 256:495, Goding, Monoclonal Antibodies: Principles and Practice, pp. 59-103 (Academic Press, 1986)). For example, antibodies can be immunized with EGFR-expressing cells, EGFR-derived peptides or other antigen. The antigen can be provided with a carrier to enhances its immunogenicity, can be provided and administered as formulations with adjuvants and/or can be administered in multiple injections. Antibodies also can be made by recombinant DNA methods (e.g. U.S. Pat. No. 4,816,567).

[0624] Anti-EGFR antibodies also include modified anti-EGFR antibodies. Modified anti-EGFR antibody can be derived from any known anti-EGFR antibody, or antigen-binding fragment thereof. For example, exemplary anti-EGFR antibodies include, for example, Erbitux® (cetuximab, C225 or IMC-C225), Hu225, 11F8 by Zhu (WO 2005/090407), EMD 72000 (matuzumab), Vectibix™ (panitumumab; ABX-EGF), TheraCIM (nimotuzumab), and Hu-Max-EGFR (zalutumumab). Libraries or collections of mutant or variant forms of such antibodies can be generated by methods known in the art to introduce amino acid replacements, additions or deletions in a reference unmodified antibody. It is within the level of one of skill in the art to generate modified or variant proteins for use in the methods herein. Methods of mutagenesis are well known in the art and include, for example, site-directed mutagenesis such as for example QuikChange (Stratagene) or saturation mutagenesis. Mutagenesis methods include, but are not limited to, site-mediated mutagenesis, PCR mutagenesis, cassette mutagenesis, site-directed mutagenesis, random point mutagenesis, mutagenesis using uracil containing templates, oligonucleotide-directed mutagenesis, phosphorothioate-modified DNA mutagenesis, mutagenesis using gapped duplex DNA, point mismatch repair, mutagenesis using repair-deficient host strains, restriction-selection and restriction-purification, deletion mutagenesis, mutagenesis by total gene synthesis, double-strand break repair, and many others known to persons of skill. In the methods herein, mutagenesis can be effected across the full length of a protein or within a region of a protein. The mutations can be made rationally or randomly. In some examples of generated collections or libraries, each amino acid that is replaced is independently replaced by 19 of the remaining amino acids or by less than 19 of the remaining amino acids, such as 10, 11, 12, 13, 14, 15, 16, 17 or 18 of the remaining amino acids at each position or a subset of positions.

[0625] A full-length or antigen-binding fragment of an antibody can be assessed or screened for conditional activity as described herein. Hence, the antibody can be any form of an antibody so long as it minimally contains a sufficient portion of the variable heavy chain and a sufficient portion of the variable light chain to immunospecifically bind EGFR. In some examples, a fragment or variant of an anti-EGFR antibody, such as a modified anti-EGFR antibody, can be used in the assays provided herein, such as, for example, any variant or fragment described herein or known in the art.

[0626] In addition, in vitro assays and in vivo animal models, such as those provided herein, can be employed for measuring the activity and/or side effects of the modified anti-EGFR antibodies. The assays provided herein include any assays that can test or assess an activity of an anti-EGFR antibody, such as a modified anti-EGFR antibody, in a detectable or otherwise measurable manner. The assays provided herein can be developed in a high throughput format in order to assess an activity of numerous anti-EGFR antibodies, for example protein variants, at one time in dual format.

[0627] Such assays can be performed in vitro or in vivo. The activity assessed can be any activity of an anti-EGFR antibody, such as binding to EGFR, cell growth inhibition (CGI) activity or tumor growth inhibition activity. For example, in vitro binding assays can be performed using solid-support binding assays or solution binding assays, where the binding is performed under the above conditions. In other examples, binding assays can be performed in vivo where binding is compared on cells present in a tumor versus cells present in a non-tumor. In particular, an in vivo bindin assay can be performed by assessing binding or localization of administered antibody to tumor cells versus basal skin keratinocytes. This is exemplified herein using xenograft or skin graft models. Other models also can be employed.

[0628] Provided herein are exemplary assays. The assays are not meant to be limiting. Any assay known to one of skill in the art is contemplated for use in the methods provided herein to identify, select or characterize anti-EGFR antibodies, including assays that detect binding, functional assays, in vivo assays, animal models and clinical assays. Descriptions of exemplary assays are provided below.

[0629] 1. Binding Assays

[0630] For example, the anti-EGFR antibodies, such as modified anti-EGFR antibodies, can be assayed for the ability to bind to EGFR. The anti-EGFR antibodies provided herein can be assessed for their ability to bind EGFR by any method known to one of skill in the art. Exemplary assays are described herein below. In some examples, a fragment or variant of EGFR can be used in the assays provided herein. For example, EGFR can be expressed as a soluble protein. For example, a soluble EGFR that can be used in the assays described herein is the soluble EGF receptor extracellular domain (sECD).

[0631] Binding assays can be performed in solution, suspension or on a solid support. For example, EGFR can be immobilized to a solid support (e.g. a carbon or plastic surface, a tissue culture dish or chip) and contacted with antibody. Unbound antibody or target protein can be washed away and bound complexes can then be detected. Binding assays can be performed under conditions to reduce nonspecific binding, such as by using a high ionic strength buffer (e.g. 0.3-0.4 M NaCl) with nonionic detergent (e.g. 0.1% Triton X-100 or Tween 20) and/or blocking proteins (e.g. bovine serum albumin or gelatin). Negative controls also can be included in such assays as a measure of background binding. Binding affinities can be determined using Scatchard analysis (Munson et al., (1980) Anal. Biochem., 107:220), surface plasmon resonance, isothermal calorimetry, quantitative ELISA or other methods known to one of skill in the art (e.g., Liliom et al. (1991) J. Immunol Methods. 143(1):119-25).

[0632] The assays described herein include dual assay comparative methods, whereby binding is determined under two different binding conditions. Non-limiting examples of different binding conditions include, for example, pH, such as low pH (e.g., pH 6.0 or pH 6.5) compared to neutral pH (e.g., pH 7.4), or lactate concentrations, such as high lactate concentrations (10-20 mM) compared to low lactate concentrations (0-5 mM). Protein concentrations that include 20-50% serum (vol/vol) or 10-50 mg/mL protein (e.g. serum albumin) also can be included. Any of the steps of the assays described herein can be performed under dual conditions to simulate two different binding conditions. For example, where the assay is an ELISA, any of the steps of an ELISA, such as coating, blocking, incubation with test molecule (e.g. therapeutic antibody or antigen binding fragments or variants thereof), or detection, can be performed under conditions described herein. In the assay, each modified anti-EGFR antibody can be screened individually and separately for binding to its cognate binding partner (e.g. EGFR) under both simulated conditions. The binding activity of the modified anti-EGFR antibody for the cognate binding partner (e.g. EGFR) can be assessed and compared. Examples of assays that measure binding include solution binding assays and solid support binding assays, such as surface plasmon resonance and immunoassays, such as ELISA.

[0633] In some examples, the anti-EGFR antibodies provided herein can be assayed for the ability to immunospecifically bind to EGFR at different pH conditions, such as low pH and neutral pH. In some examples, the assays can identify modified anti-EGFR antibodies that have higher activity, for example binding activity, in low pH than at neutral pH. In particular examples herein, binding activity of a modified anti-EGFR antibody or variants thereof to EGFR or a soluble EGFR can be assessed under conditions of low pH (<7.4) and elevated lactic acid concentrations, and under conditions of physiologic pH of about 7.3 to 7.4 and low lactate concentrations. In addition, human serum (e.g., 5% or 25% human serum) can be included in the binding assay to further mimic the natural environments.

[0634] Such assays can be performed, for example, in solution (e.g., Houghten (1992) Bio/Techniques 13:412-421), on beads (Lam (1991) Nature 354:82-84), on chips (Fodor (1993) Nature 364:555-556), on bacteria (U.S. Pat. No. 5,223,409), on spores (U.S. Pat. Nos. 5,571,698; 5,403,484; and 5,223,409), on plasmids (Cull et al. (1992) Proc. Natl. Acad. Sci. USA 89:1865-1869) or on phage (Scott and Smith (1990) Science 249:386-390; Devlin (1990) Science 249:404-406; Cwirla et al. (1990) Proc. Natl. Acad. Sci. USA 87:6378-6382; and Felici (1991) J. Mol. Biol. 222:301-310).

[0635] The anti-EGFR antibodies, such as modified anti-EGFR antibodies, can be labeled so that the binding activity can be assessed and determined. For example, to detect binding, the anti-EGFR antibodies, such as modified anti-EGFR antibodies, can be labeled with a detectable moiety or tag in order to facilitate detection. The skilled artisan can select an appropriate detectable moiety or tag for assay conditions. For example, some secondary reagents, such as anti-Ig antibodies cannot be used to detect binding of a modified protein that is an antibody in a solution that contains human serum. In addition, an anti-IgG antibody cannot be used to detect binding of a biomolecule that is an antibody.

[0636] Any detectable moiety or other moiety known to one of skill in the art that is capable of being detected or identified can be used. The moiety or tag can be linked to the test molecule, such as a therapeutic protein or antibody, directly or indirectly, for example using a linker. Linkage can be at the N- or C-terminus of the therapeutic antibody. Exemplary tags and moieties that can be used in the method herein, include but are not limited to, any set forth in Table 12.

TABLE 12
Exemplary tags and moieties

| | | # of | Size | SEQ ID |
|---|---|---|---|---|
| Name | Sequence | Residues | (Da) | NO |
| c-Myc | EQKLISEEDL | 10 | 1200 | 1082 |
| FLAG | DYKDDDDK | 8 | 1012 | 13 |
| His | HHHHHH | 6 | | 12 |
| HA | YPYDVPDYA | 9 | 1102 | 1083 |
| VSV-G | YTDIEMNRLGK | 11 | 1339 | 1084 |
| HSV | QPELAPEDPED | 11 | 1239 | 1085 |
| VS | GKPIPNPLLGLDST | 14 | 1421 | 1086 |
| Poly Arg | RRRRR | 5-6 | 800 | 1087 |
| Strep-tag-II | WSHPQFEK | 8 | 1200 | 1088 |
| S | KETAAAKFERQHMDS | 15 | 1750 | 1089 |
| 3x FLAG | DYKDHDGDYKDHDIDYKDDDDK | 22 | 2730 | 1090 |
| HAT | KDHLIHNVHKEFHAHAHNK | 19 | 2310 | 1091 |
| SBP | MDEKTTGWRGGHVVEGLAGELEQLRARLEHHP | 38 | 4306 | 1092 |
| | QGQREP | | | |

[0637] Any linker known to one of skill in the art that is capable of linking the detectable moiety to the therapeutic antibodies described herein can be used. Exemplary linkers include the glycine rich flexible linkers (-G₄S—)ₙ, where n is a positive integer, such as 1 (SEQ ID NO:1094), 2 (SEQ ID NO:1095), 3 (SEQ ID NO: 21), 4 (SEQ ID NO: 1096), 5 (SEQ ID NO: 1097), or more.

[0638] Binding assays can be performed in solution, by affixing the modified anti-EGFR antibody to a solid support, or by affixing EGFR to a solid support. A description of exemplary assays that can be used to measure binding between the modified anti-EGFR antibodies and EGFR are provided in the subsections that follow.

[0639] a. Solid Support Binding Assays

[0640] The assays to assess activity of the anti-EGFR antibodies, such as modified anti-EGFR antibodies, provided herein include binding assays in which binding of the anti-EGFR antibody to EGFR is measured under conditions in which one or both is attached to a solid support. For example, the anti-EGFR antibody, such as modified anti-EGFR antibody, in solution can interact with EGFR immobilized on a solid support, or EGFR in solution can interact with a modified anti-EGFR antibody immobilized on a solid support. Solid support binding assays can be advantageous compared to solution binding assays because immobilization on the solid phase can facilitate separation of bound anti-EGFR antibody from unbound anti-EGFR antibody. Any solid support binding assay known to the skilled artisan is contemplated for use in the methods provided herein, including surface plasmon resonance, bio-layer interferometry and ELISA.

[0641] i. Surface Plasmon Resonance

[0642] Surface Plasmon resonance (SPR) can detect binding of unlabeled molecules in highly sensitive assays by measuring refractive index changes that occur upon molecular binding of analyte molecules in a sample to immobilized molecules (Piliarik et al., (2009) Methods Mol. Biol. 503:65-88). SPR occurs when surface plasmon waves, which are collective oscillations of electrons in a metal, are excited at a metal/dielectric interface. SPR reduces reflected light intensity at a specific combination of angle and wavelength. Molecular binding can change the refractive index and thickness of an ultra-thin organic (dielectric) layer on the metal film, which changes the SPR resonance conditions.

[0643] In some examples, SPR kinetic analysis can be used to determine the binding on and off rates of a modified anti-EGFR antibody to EGFR (see, e.g., BiaCore 2000, Biacore AB, Upsala, Sweden and GE Healthcare Life Sciences; Malmqvist et al. (1993) Curr Opin Immunol. 5(2):282-6; Garcia-Ojeda et al. (2004) Infect Immun. 72(6):3451-60). SPR kinetic analysis comprises analyzing the binding and dissociation of an antigen from chips with immobilized antibodies on their surface. Using SPR to measure binding of anti-EGFR antibodies to the soluble extracellular domain of EGFR is within the ability of the skilled artisan (e.g., Saxena et al. (2011), J. Clin. Oncol. 29(suppl):e13030).

[0644] For example, a solution with one or more anti-EGFR antibodies, such as one or more modified anti-EGFR antibodies, can be passed over an immobilized EGFR, or a solution with EGFR can be passed over an immobilized anti-EGFR antibody or antibodies. Association rates can be measured by measuring SPR signal as a function of time. After association, a buffer solution can be passed over the solid support, and dissociation rates can be measured as a function of time. From the association and dissociation rates, an equilibrium binding constant can be calculated. (Jecklin et al. (2009), J. Mol. Recognit. 22(4):319-29; Nguyen et al, (2007) Methods. 42(2):150-61; Tanious et al. (2008), Methods Cell Biol. 84:53-77). Measuring activity of an anti-EGFR antibody by detecting binding to EGFR using SPR is within the ability of the skilled artisan (see, e.g., Alvarenga et al. (2012) Anal. Biochem 421(1):138-151).

[0645] ii. Bio-Layer Interferometry

[0646] The activity of the modified anti-EGFR antibodies provided herein can be assessed by measuring binding of the antibodies to EGFR by bio-layer interferometry. Bio-layer interferometry is a label-free method for detecting biomolecular interactions by measuring the interference pattern of visible light reflected from two surfaces: an immobilized biomolecule layer on a biosensor tip, and an internal reference layer. Binding of a molecule in solution to the immobilized biomolecule increases the thickness of the biomolecule layer, which results in a wavelength shift. After binding, the immobilized biomolecule can be contacted with a buffer solution, and dissociation of the molecule can be measured. Binding to the immobilized biomolecule can be measured in real time, and association rate constant, dissociation rate constants, binding affinity and binding specificity can be determined. For example, streptavidin can be attached to a biolayer, and biotinylated sEGFR can be bound to a streptavidin biolayer. An anti-EGFR antibody, such as a modified anti-EGFR antibody, in a suitable buffer can be added to the biolayer and contacted with the sEGFR. The concentration of the anti-EGFR antibody can be selected empirically or based on factors known to the skilled artisan, such as the approximate expected dissociation constant, solubility of the antibody, temperature, and buffer conditions. Binding between sEGFR and the anti-EGFR antibody can be quantitated by measuring changes in the interference pattern generated from light reflected from the optical layer and the biolayer. Binding kinetics can be measured to calculate the association rate constant. To measure the dissociation rate constant, the sensor can be incubated in a suitable buffer, and dissociation of the anti-EGFR antibody and EGFR can be measured. Binding affinity of the anti-EGFR antibody can be calculated as the ratio of the kinetic dissociation rate constant and the kinetic association rate constant. Examples of bio-layer interferometry assays to measure the dissociation constant between modified anti-EGFR antibodies and EGFR are described in Example 3.

[0647] iii. Immunoassays

[0648] Exemplary immunoassays which can be used to analyze binding of the anti-EGFR antibodies, such as modified anti-EGFR antibodies, provided herein include, but are not limited to, competitive and non-competitive assay systems using techniques such as, but not limited to, western blots, radioimmunoassays, ELISA (enzyme linked immunosorbent assay), Meso Scale Discovery (MSD, Gaithersburg, Md.), “sandwich” immunoassays, immunoprecipitation assays, ELISPOT, precipitin reactions, gel diffusion precipitin reactions, immunodiffusion assays, agglutination assays, complement-fixation assays, immunoradiometric assays, fluorescent immunoassays, protein A immunoassays, immunohistochemistry, or immuno-electron microscopy. Such assays are routine and well known in the art (see, e.g., Ausubel et al., Eds, 1994, Current Protocols in Molecular Biology, Vol. 1, John Wiley & Sons, Inc., New York, which is incorporated by reference herein in its entirety). Other assay formats include liposome immunoassays (LIA), which use liposomes designed to bind specific molecules (e.g., antibodies) and release encapsulated reagents or markers. The released chemicals are then detected according to standard techniques (see Monroe et al., (1986) Amer. Clin. Prod. Rev. 5:34-41). Exemplary immunoassays not intended by way of limitation are described briefly below.

[0649] a) ELISA

[0650] Binding between an anti-EGFR antibody, such as a modified anti-EGFR antibody, and EGFR can be detected by Enzyme-linked immunosorbent Assay (ELISA). ELISA is an immunological assay that can be used to detect protein/ligand interactions, such as antibody/antigen interacts. Typically, in an ELISA, the antibody/antigen interactions are detected by measuring a signal from an enzyme marker linked directly or indirectly to the antibody/antigen complex.

[0651] For example, an ELISA can include steps of: 1) coating a solid phase with EGFR or a variant thereof; 2) incubating the solid phase with a blocking reagent to block non-specific binding sites on the solid phase; 3) incubating the solid phase with a modified anti-EGFR antibody; 4) incubating with a secondary detection agent, such as a labeled secondary antibody capable of detecting the modified anti-EGFR antibody, but not human serum components contained in the assay buffers, that can bind to the modified anti-EGFR antibody; and 5) detecting the secondary detection agent. Furthermore, one or more washing steps (e.g., 1, 2, 3, 4 or more washing steps) can be included between any steps of the method.

[0652] In the dual format or duplicate assay, EGFR can be immobilized under standard conditions that are the same. Typically, the buffer that is used to facilitate adsorption or immobilization under both conditions is a neutral or physiologic buffer. Exemplary of physiologic buffers include, but are not limited to, phosphate buffered saline (PBS), Hank's balanced salt solution (HBSS), Ringers or Krebs. The pH and buffering capacity is a function of the assay conditions and can be empirically determined or chosen by one of skill in the art. Exemplary of a physiologic buffer is Krebs-Ringer Bicarbonate (KRB) buffer (Sigma Aldrich, Catalog No. K4002). Further, adsorption or immobilization of the immobilized agent, typically the cognate binding partner, on a solid support is effected in a buffer that does not contain human serum, since human serum is used in the contacting step or screen to simulate natural environment conditions.

[0653] Varying concentrations of EGFR, in KRB buffer or other similar physiologic buffer can be adsorbed onto a solid support. For example, from at or about between 1 and 50 nM, for example, 3 and 30 nM, such as 5-20 nM, for example, at or about 3, 6, 9, 12, 13, 14, 15, 16, 17, 18, 19, 20, 25, 30, 35, 40 or 50 nM can be adsorbed. The amount EGFR to be adsorbed is a function of the binding agent and can be empirically determined, such as by using a control known to bind the target antigen. Adsorption can proceed for any desired length of time and temperature to allow the cognate binding protein to bind to binding sites on the solid support. For example, adsorption is generally performed at 4° C.-37° C., such as 4° C., room temperature (i.e., 22° C.) or 37° C. The time for adsorption is generally 30 minutes to 48 hours or more, and can vary as a function of the temperature.

[0654] Following affixation of EGFR to a support, the subsequent steps of the method can be performed as two separate assays. For example, supports are treated separately for performance of the binding assay under two varied assay conditions, such as at low pH and at neutral pH. The conditions also can include 20-50% serum (vol/vol) or 10-50 mg/mL protein (e.g. serum albumin). In some examples, it is understood that in performing the separate assays, the only conditions that are varied relate to the buffer conditions. Time and temperature incubation conditions are generally the same between the parallel assays.

[0655] In some examples, prior to adding an anti-EGFR antibody, non-specific protein binding sites on the surface of the solid phase support are typically blocked. Hence, the step of contacting the anti-EGFR antibodies with EGFR typically can be performed after a blocking step. Blocking of the solid support can reduce nonspecific binding to the solid support, reduce background signal, reduce nonspecific binding to adsorbed proteins, and stabilize the adsorbed protein. The selection of conditions for blocking is within the ability of one of skill in the art. Any blocking conditions described in the art can be used in the methods provided herein.

[0656] Typically, the incubation reaction can proceed for any desired length of time and temperature to allow the anti-EGFR antibody to bind to EGFR. For example, binding is generally performed at 4° C.-37° C., such as 4° C., room temperature or 37° C. The time for binding is generally 30 minutes to 48 hours or more, and can be a function of the temperature. For example, contacting can be performed with 1 mM lactic acid, pH 7.4, and 25% human serum. Separately, the contacting step can be performed with 16.5 mM lactic acid, pH 6.0, 25% human serum. In each contacting reaction, contacting can be for 1 hour at room temperature (i.e., 22° C.). The solid support can be washed in the same buffer used for binding to remove any unbound target antigen. In some examples, the ELISA assay can be performed in the presence of varying concentrations of modified anti-EGFR antibody. Generally, varying concentrations are tested in serial dilutions. Whole supernatant, diluted supernatant or purified protein can be tested.

[0657] The anti-EGFR antibodies, such as a modified anti-EGFR antibodies, that bind to EGFR can be selected or identified using any assay or method known to one of skill in the art. Typically, the reaction can proceed for any desired length of time and temperature to allow detection of the binding molecule or protein. For example, detection is generally performed at 4° C.-37° C., such as 4° C., room temperature or 37° C. The time for binding is generally 30 minutes to 48 hours or more, and is a function of the temperature. Typically, binding of the binding molecule or protein is at room temperature at or about between 30 minutes to 4 hours, such as 1 hour to 2 hours, for example about 1 hour. The solid support can be washed in the same buffer used for binding to remove any unbound target antigen.

[0658] Once binding activity is determined under each assay condition, the binding activity under the first condition (e.g. low pH and/or elevated lactic acid concentration) and the second condition (e.g. normal pH and/or low lactic acid concentration) are compared. For example, the optical density in each well (or an average of two or more wells) can be compared (see, e.g., Tables 15 and 16). In some examples, the optical density in each well (or an average of two or more wells) is divided by the concentration of the modified anti-EGFR antibody to calculate a specific activity. In some examples, the specific activity is normalized to give a normalized specific activity (NSA) for each modified anti-EGFR antibody by dividing the specific activity of the modified anti-EGFR antibody by the specific activity of a reference antibody, such as an anti-EGFR parental antibody, including, for example, Cetuximab (see, e.g., Table 16).

[0659] Anti-EGFR antibodies, such as modified anti-EGFR antibodies, can be identified that have greater activity at low pH than at neutral pH. In some examples, modified anti-EGFR antibodies that have increased binding activity at low pH than at neutral pH can be identified. For example anti-EGFR antibodies with a NSA at low pH greater than the NSA at neutral pH can be identified. In some examples, anti-EGFR antibodies that have a ratio of the (NSA at low pH)/(NSA at neutral pH) greater than 1, 1.1, 1.2, 1.3, 1.4, 1.5, 1.6, 1.7, 1.8, 1.9, 2.0, 2.1, 2.2, 2.3, 2.4, 2.5, 2.6, 2.7, 2.8, 2.9, 3.0, 3.5, 4.0, 4.5, 5.0, 5.5, 6.0, 7.0, 8.0 or more. In some examples, anti-EGFR antibodies are identified with a (NSA at low pH) above a threshold value, such as 0.1, 0.2, 0.3, 0.4, 0.5, 0.6, 0.7, 0.8, 0.9, 1.0 or more. In some examples, anti-EGFR antibodies are identified with a (NSA at neutral pH) below a cutoff value, such as 0.1, 0.2, 0.3, 0.4, 0.5, 0.6, 0.7, 0.8, 0.9, 1.0 or more. Anti-EGFR antibodies, such as modified anti-EGFR antibodies, that are more active at low pH than at neutral pH can include anti-EGFR antibodies that meet one or more of these criteria. In some examples, the low pH is pH 6.0 or pH 6.5. In some examples, the neutral pH is pH 7.4.

[0660] The ELISA methods described herein are exemplified in Example 1. A further description of the steps of the ELISA method and components of the method are provided below.

[0661] Solid supports that can be used in the binding assays provided herein include any carrier that is capable of being affixed with a molecule, for example a test molecule or a cognate binding partner of a protein such as a ligand, receptor or antigen. Typically, to facilitate high throughput screening of variant test molecules (e.g. a library or collection of antibody variants such as anti-EGFR antibody variants), a cognate binding partner is affixed to the solid support. Examples of carriers for use as solid supports in the methods provided herein include, but are not limited to, glass, polystyrene, polypropylene, polyethylene, dextran, nylon, amyloses, natural and modified celluloses, polyacrylamides, agaroses and magnetic solid supports, such as solid supports that include magnetite. The solid support can be one or more beads or particles, microspheres, a surface of a tube or plate, a filter membrane, and other solid supports known in the art. Exemplary solid support systems include, but are not limited to, a flat surface constructed, for example, of glass, silicon, metal, nylon, cellulose, plastic or a composite, including multiwell plates or membranes; or can be in the form of a bead such as a silica gel, a controlled pore glass, a magnetic (Dynabead) or cellulose bead. Further, such methods can be adapted for use in suspension or in the form of a column.

[0662] It is within the level of one of skill in the art to select a suitable solid support depending on the particular assay conditions. For example, nickel coated microplates can be less suitable for binding of His-tagged proteins, since buffer pH can affect antigen coating to Ni-coated but not high-bind plates. It is within the level of one of skill in the art to determine whether a solid support is suitable for use with varying pH conditions.

[0663] Test molecules or cognate binding partners can be immobilized to the solid support by any method known to one of skill in the art. Covalent or non-covalent methods for attachment can be used. Typically, the test molecule or cognate binding partner (such as a ligand or antigen) is immobilized by adsorption from an aqueous medium. In some examples, adsorption can be carried out under conditions that simulate a diseased microenvironment (such as a tumor or cancer microenvironment), under conditions that simulate a normal microenvironment, or under standard conditions known to one of skill in the art. For example, adsorption can be carried out using a buffer with a pH range of at or about between 6.0 to 7.4, in some examples at or about pH 7.4. In particular, to effect adsorption, a high binding microplate can be used as a solid support. High binding plates are known to those of skill in the art and readily available from various manufacturers (see e.g., Nunc Maxisorp flat-bottom plates available from eBioscience, San Diego, Calif., Cat. No. 44-2404-21; Costar 96-well EIA/RIA Stripwell plate, Costar 2592).

[0664] Other modes of affixation, such as covalent coupling or other well known methods of affixation of the target protein to the solid matrix can also be used. Covalent methods of attachment of therapeutic proteins and/or cognate binging partners include chemical crosslinking methods. Reactive reagents can create covalent bonds between the support and functional groups on the protein or cognate binding partner. Examples of functional groups that can be chemically reacted are amino, thiol, and carboxyl groups. N-ethylmaleimide, iodoacetamide, N-hydrosuccinimide, and glutaraldehyde are examples of reagents that react with functional groups. In other examples, test molecules and/or cognate binding partners can be indirectly attached to a solid support by methods such as, but not limited to, immunoaffinity or ligand-receptor interactions (e.g. biotin-streptavidin or glutathione S-transferase-glutathione). For example, a test molecules can be coated to an ELISA plate, or other similar addressable array.

[0665] Blocking solutions include those containing human, bovine, horse or other serum albumin. Typically, the blocking solution contains human serum. Blocking of a solid support, such as a plate, can be performed using a binding assay buffer to which one or more blocking agents are added. Exemplary blocking agents include 1-5% Bovine Serum Albumin, 1-5% non-fat dry milk and 25% human serum. Detergents, such as Tween-20, and preservatives, such as thimerosal, can be added to the blocking solution. Binding assay buffers include i.e. the tumor microenvironment buffer or the normal physiologic buffer. The aqueous protein solution-solid support mixture is typically maintained for a time period of 30 minutes, 1 hour, or longer, and can vary as a function of the temperature. The blocking reaction can be performed at any temperature, and generally can be performed 4° C.-37° C., such as 4° C., room temperature (i.e., 22° C.) or 37° C. In some examples, the reaction is allowed to proceed for at least one hour at a temperature of about 4° C.-37° C. For example, blocking can be achieved at room temperature for one hour. After incubation and blocking, the resulting solid phase can be thereafter rinsed free of unbound protein prior to contact with the test molecule (e.g. therapeutic protein or antibody or variants thereof).

[0666] Examples of enzyme labels include horseradish peroxidase, alkaline phosphatase, and beta-D-galactosidase. Examples of enzyme substrates that can be added to develop the signal include PNPP (p-Nitrophenyl Phosphate, Disodium Salt), ABTS (2,2′-Azinobis[3-ethylbenzothiazoline-6-sulfonic acid]-diammonium salt), OPD (o-phenylenediamine dihydrochloride), and TMB (3,3′,5,5′-tetramethylbenzidine) (SOMA Labs, Romeo, Mich.), including Sureblue TMB Microwell Peroxidase Substrate 1-component (KPL, #52-00-03). The reaction can be stopped by adding a stopping reagent (e.g. TMB stop solution). The absorbance at a suitable wavelength (i.e. 450 nm) can be determined.

[0667] For fluorescence, a large number of fluorometers are available. For chemiluminescers, such as horseradish peroxidase (HRP), luminometers or films are available. With enzymes, a fluorescent, chemiluminescent, or colored product can be determined or measured fluorometrically, luminometrically, spectrophotometrically or visually. For example, an anti-tag reagent can be conjugated to horseradish peroxidase (HRP) or other detectable agent.

[0668] Detection can be facilitated by the presence of a fluorescent, radioactive or other detectable moiety. Typically, because the anti-EGFR antibodies are tagged, detection is effected using an anti-tag reagent. The choice of anti-tag reagent is a function of the tag that is employed with the binding molecule or protein. In addition, an anti-tag reagent is chosen that is compatible with the environment conditions (e.g. pH) used in the assay. It is within the level of one of skill in the art to identify or select such reagents, and test their compatibility with the assay conditions. For example, the Examples exemplify such procedures.

[0669] Anti-tag reagents are readily available such as from commercial sources or other sources. Exemplary anti-tag reagents that can be used for detection in the methods herein include, but are not limited to an anti-FLAG antibody or anti-Myc antibody (available from vendors such as Abcam, Cambridge, Mass.; GeneTex, Irvine, Calif.).

[0670] Typically, in the methods herein, the method of detection of the bound complex is one that is capable of being quantitated such that the level of activity can be assessed. For example, a label can produce a signal, such as a colorimetric signal, a chemiluminescent signal, a chemifluorescent signal or a radioactive signal. Depending upon the nature of the label, various techniques can be employed for detecting or detecting and quantitating the label. For example, methods of quantitation include, but are not limited to, spectrophotometric, fluorescent and radioactive methods.

[0671] b) Immunoprecipitation

[0672] Activity of the anti-EGFR antibodies, such as modified anti-EGFR antibodies, provided herein can be assessed by detecting binding to EGFR by immunoprecipitation. Immunoprecipitation protocols generally comprise lysing a population of cells in a lysis buffer such as 1% NP-40 Alternative, 20 mM Tris (pH 8.0), 137 mM NaCl, 10% glycerol, 2 mM EDTA, 1 mM activated sodium orthovanadate, 10 μg/mL Aprotinin, 10 μg/mL Leupeptin; or RIPA buffer (1% NP-40 or Triton X-100, 1% sodium deoxycholate, 0.1% SDS, 0.15 M NaCl, 0.01 M sodium phosphate at pH 7.2, 1% Trasylol). The lysis buffer can be supplemented with protein phosphatase and/or protease inhibitors (e.g., EDTA, PMSF, aprotinin, sodium vanadate). Additional steps can include adding the modified anti-EGFR antibody to the cell lysate, and incubating for a period of time (e.g., 1 to 4 hours) at 40° C., adding protein A and/or protein G sepharose beads to the cell lysate, incubating for about an hour or more at 40° C., washing the beads in lysis buffer and resuspending the beads in SDS/sample buffer. The ability of the modified anti-EGFR antibody to immunoprecipitate EGFR can be assessed by, e.g., western blot analysis. One of skill in the art is knowledgeable as to the parameters that can be modified to increase the binding of an antibody to an antigen and decrease the background (e.g., pre-clearing the cell lysate with sepharose beads). For further discussion regarding immunoprecipitation protocols see, e.g., Ausubel et al., Eds, 1994, Current Protocols in Molecular Biology, Vol. 1, John Wiley & Sons, Inc., New York at 10.16.1.

[0673] c) Western Blot

[0674] Activity of the anti-EGFR antibodies, such as modified anti-EGFR antibodies, provided herein can be assessed by detecting binding to EGFR by Western blot. Western blot analysis generally includes preparing extract samples (e.g. from a tissue that expresses EGFR, or a tissue from a subject or patient with a disease or disorder that can be treated by administering an anti-EGFR antibody, such as a disease or disorder described herein). Additional steps include electrophoresis of the samples in a polyacrylamide gel (e.g., 8%-20% SDS-PAGE depending on the molecular weight of the antigen) or via 2-D gel electrophoresis (see, e.g., WO 04/043276), transferring the sample from the polyacrylamide gel to a membrane such as nitrocellulose, PVDF or nylon, blocking the membrane in blocking solution (e.g., PBS with 3% BSA or non-fat milk), washing the membrane in washing buffer (e.g., PBS-Tween 20), probing the membrane with primary antibody (i.e. the antibody of interest) diluted in blocking buffer, washing the membrane in washing buffer, probing the membrane with a secondary antibody (which recognizes the primary antibody, e.g., an anti-human antibody) conjugated to an enzymatic substrate (e.g., horseradish peroxidase or alkaline phosphatase) or radioactive molecule (e.g., ³²P or ¹²⁵I) diluted in blocking buffer, washing the membrane in wash buffer, and detecting the presence of the antigen. One of skill in the art is knowledgeable as to the parameters that can be modified to increase the signal detected and to reduce the background noise. For further discussion regarding western blot protocols see, e.g., Ausubel et al., Eds, 1994, Current Protocols in Molecular Biology, Vol. 1, John Wiley & Sons, Inc., New York at 10.8.1.

[0675] d) Immunohistochemistry

[0676] Activity of the anti-EGFR antibodies, such as modified anti-EGFR antibodies, provided herein can be assessed by detecting binding to EGFR by immunohistochemistry. Immunohistochemistry generally comprises preparing a tissue sample (e.g. from a tissue that expresses EGFR, or a tissue from a subject or patient with a disease or disorder that can be treated by administering an anti-EGFR antibody, such as a disease or disorder described herein), fixing the tissue to preserve protein molecules in their native conformation, bathing the sample in a permeabilization reagent (e.g. Tween, Nonidet P40) to penetrate the tissue, blocking the sample with blocking solution (e.g., PBS with 3% BSA or non-fat milk), washing the sample in washing buffer (e.g., PBS-Tween 20), probing the sample with an anti-EGFR antibody (such as a modified anti-EGFR antibody described herein) diluted in blocking buffer, washing the sample in washing buffer, probing the sample with a secondary antibody (which recognizes the anti-EGFR antibody) conjugated to a fluorescent dye (e.g. fluorescein isothiocyanate, Alexa fluor, rhodamine) diluted in blocking buffer, washing the sample in wash buffer, and detecting the presence of the antigen via fluorescent microscopy. One of skill in the art is knowledgeable as to the parameters that can be modified to increase the signal detected and to reduce the background noise.

[0677] e) Radioimmunoassay

[0678] Activity of the anti-EGFR antibodies, such as modified anti-EGFR antibodies, provided herein can be assessed by detecting binding to EGFR by radioimmunoassay. The binding affinity of a modified anti-EGFR antibody to an antigen, such as EGFR, and the off-rate of the antibody-antigen interaction can be determined, for example, by competitive binding assays. One example of a competitive binding assay is a radioimmunoassay involving the incubation of labeled antigen (e.g., ³H or ¹²⁵I) with the antibody of interest in the presence of increasing amounts of unlabeled antigen, and the detection of the antibody bound to the labeled antigen. The affinity of an anti-EGFR antibody provided herein for EGFR and the binding off-rates can be determined from the data by Scatchard plot analysis. Competition with a second antibody can also be determined using radioimmunoassays. In this case, an EGFR antigen, such as the EGFR soluble fragment, is incubated with an anti-EGFR antibody provided herein conjugated to a labeled compound (e.g., ³H or ¹²⁵I) in the presence of increasing amounts of an unlabeled second antibody.

b. Solution Binding Assays

[0679] Solution binding assays can be used to measure the activity of the anti-EGFR antibodies, such as modified anti-EGFR antibodies, provided herein. In some examples, solution binding assays are used to measure the binding of the anti-EGFR antibodies to EGFR, or a fragment or variant thereof, such as the soluble EGFR fragment. The skilled artisan can select a solution binding assay to measure binding of the modified anti-EGFR antibodies provided herein. Below is a brief description of exemplary solution binding assays that can be used. However, these are not meant to be limiting, and any solution binding assay known to the skilled artisan is contemplated for use in the methods provided herein, including equilibrium dialysis, competitive binding assays (e.g., Myers et al., (1975) Proc. Natl. Acad. Sci. USA), radiolabeled binding assays (e.g., Feau et al., (2009) J. Biomol. Screen. 14(1):43-48), calorimetry (including isothermal titration calorimetry (ITC) and differential scanning calorimetry (e.g., Perozzo et al., (2004) J. Recept Signal. Transduct Res. 24(1-2):1-52; Holdgate (2001) Biotechniques 31(1):164-166, 168, 170), Celej et al. (2006) Anal. Biochem. 350(2):277-284)), and spectroscopic fluorescence assays, including fluorescence resonance energy transfer assays. The conditions for the method herein where binding activity is determined in solution can be determined by one of skill in the art based on the description herein. For example, the conditions can be adapted from conditions discussed above for binding assays performed on a solid support.

[0680] i. Isothermal Titration Calorimetry (ITC)

[0681] Activity of the anti-EGFR antibodies, such as modified anti-EGFR antibodies, can be assessed by detecting binding to EGFR by Isothermal titration calorimetry (ITC). In ITC, one binding partner is titrated into a solution containing the other binding partner, thereby generating or absorbing heat, which is quantified by the calorimeter. ITC can be used to detect heat effects from reactants in quantities of nanomoles or less. For example, isothermal titration calorimetry assays can be performed to measure all thermodynamic parameters, including free energy of binding (ΔG), enthalpy (ΔH), and entropy (ΔS) of binding, and the heat capacity change (ΔCp), involved in binding of a therapeutic protein to a cognate binding partner. Analysis of these features can help elucidate the activity and thermodynamic parameters of binding between a modified anti-EGFR antibody and EGFR (Perozzo et al., (2004) J. Recept. Signal. Transduct. Res. 24(1-2):1-52). Measuring activity of an anti-EGFR antibody by detecting binding to EGFR using ITC is within the ability of the skilled artisan (see, e.g., Alvarenga et al. (2012) Anal. Biochem 421(1):138-151).

[0682] ii. Spectroscopic Assays

[0683] Spectroscopic assays can be used to measure activity of an anti-EGFR antibody, such as a modified anti-EGFR antibody, provided herein. Binding of a anti-EGFR antibody and EGFR can be detected by any spectroscopic assay known to one of skill in the art, including UV-vis spectroscopic techniques, fluorescence assays such as fluorescence resonance energy transfer assays and fluorescence quenching assays. (Wu et al. (2007), J. Pharm. Biomed. Anal. 44(3):796-801) For example, changes in fluorescence or UV/vis absorption as a result of a anti-EGFR antibody binding to EGFR, such as quenching of inherent fluorescence, can be detected. In some examples, the anti-EGFR antibody and/or EGFR can be labeled with a fluorescent label or a UV/vis label. Labeling anti-EGFR antibodies is within the ability of the skilled artisan (see, e.g., Gleysteen et al. (2008) Head & Neck 30(6):782-789; Rosenthal et al. (2007) Mol. Cancer Ther. 6:1230-1238). After measuring a spectroscopic signal, the observed binding constant can be calculated (e.g., Zhang et al. (2009) Spectrochim Acta A Biomol. Spectrosc. 72(3):621-626).

[0684] 2. Cell Based Assays

[0685] Assays to measure activity of the anti-EGFR antibody, such as a modified anti-EGFR antibodies, provided herein include cell based assays. Cell lines that can be used include any cell lines described in the art or cell lines that can be obtained from repositories such as the American Type Culture Collection (ATCC). The skilled artisan can select cell lines with desired properties. Generally, assays are performed using cell lines known to express EGFR. Such cells are known to one of skill in the art. For example, one can consult the ATCC Catalog (atcc.org) to identify cell lines. Also, if a particular cell type is desired, the means for obtaining such cells, and/or their instantly available source is known to those in the art. An analysis of the scientific literature can readily reveal appropriate choice of cells expressing EGFR. Exemplary cells lines that express EGFR that can be used in cell based assays to screen the anti-EGFR antibodies provided herein include DiFi human colorectal carcinoma cells, A431 cells (ATCC CRL-1555), Caco-2 colorectal adenocarcinoma cells (ATCC HTB-37), HRT-18 colorectal adenocarcinoma cells (ATCC CCL-244), HT-29 colorectal adenocarcinoma cells (ATCC HTB-38), human neonatal keratinocytes and MCF10A epithelial cells (ATCC CRL-10317) (see, e.g., Olive et al. (1993) In Vitro Cell Dev Biol. 29A(3 Pt 1):239-248; Wu et al. (1995) Clin. Invest. 95(4): 1897-1905). Exemplary cells that can be used in the cell based assays described herein include any cells described herein or known in the art, including, for example, tumor or cancer cells described herein.

[0686] In some examples, assays to measure the activity of an anti-EGFR antibody, such as a modified anti-EGFR antibodies, provided herein, such as the assays described herein, are performed using cell lines from a tissue associated with a side effect of anti-EGFR antibodies, such as any side effect described herein or known in the art. For example, assays can be performed using skin cell lines. EGFR is expressed in several cell types, including keratinocytes, such as basal keratinocytes and the outer root sheath of hair follicles; and cells of eccrine and sebaceous glands (Albanell et al. (2002) J. Clin. Oncol. 20(1):110-124; Lacouture, and Melosky (2007) Skin Therapy Lett. 12, 1-5; Nanney et al. (1990) J. Invest. Dermatol 94(6):742-748). In some examples, cell-based assays to measure activity of the anti-EGFR antibodies provided herein are performed using keratinocytes, such as, for example, human neonatal keratinocytes; cells from the outer root sheath of hair follicles; and cells of eccrine and sebaceous glands. Other cells that can be used in cell-based assays to measure activity of the anti-EGFR antibodies provided herein include, for example, melanocytes, such as, for example, newborn melanocytes; Langerhans cells; fibroblasts; Merkel's cells; nerve cells; glandular cells; sebaceous gland cells (sebocytes); and fibroblasts, such as, for example dermal fibroblasts and wound fibroblasts. Methods of culturing such cells are within the ability of the skilled artisan (see, e.g., Limat and Hunziker (1996) Methods Mol Med. 2:21-31; Abdel-Naser et al. (2005) Egypt. Dermatol. Online J. 1(2):1).

[0687] Cell lines expressing EGFR can be generated by transient or stable transfection. In addition, any primary cell or cell line can be assessed for expression of EGFR, such as by using fluorescently labeled anti-EGFR antibodies and fluorescence activated cell sorting (FACS). Exemplary cell lines include A549 (lung), HeLa, Jurkat, BJAB, Colo205, H1299, MCF7, MDA-MB-231, PC3, HUMEC, HUVEC, and PrEC.

[0688] In some examples, an anti-EGFR antibody, such as a modified anti-EGFR antibody, purified or unpurified, is added exogenously to cells. In some examples, one or more nucleic acid(s) encoding a modified anti-EGFR antibody, can be introduced into a vector suitable for expression in cells, such as a cell described herein. Cells can be transfected with the vector, and the anti-EGFR antibody therapeutic protein(s) are expressed by the cells. The anti-EGFR antibody can be expressed as secreted, soluble molecules or intracellular antibodies. Methods of transfection are known to those of skill in the art (see e.g., Kaufman R. J. (1990) Methods in Enzymology 185:537-566; Kaufman et al. (1990) Methods in Enzymology 185:537-566; Hahn and Scanlan (2010) Top. Curr. Chem. 296:1-13), and include, for example, chemical methods such as polycationic cyclodextrin vectors (e.g., Cryan et al, (2004) Eur J Pharm Sci. 21(5):625-33) and liposome complexes, including cationic liposomes (e.g., Gao and Huang (1995) Gene Ther. 2(10):710-722). Exemplary cationic liposomes which can be used include those described in U.S. Pat. No. 7,989,606, including 3-beta-[N—(N′,N′-dimethyl-aminoethane)-1-carbamoyl]-cholesterol (DC-Chol), 1,2-bis(oleoyloxy-3-trimethylammonio-propane (DOTAP) (see, for example, International Pat. Publ No. WO 98/07408), lysinylphosphatidylethanol amine (L-PE), lipopolyamines such as lipospermine, N-(2-hydroxyethyl)-N,N-d-dimethyl-2,3-bis(dodecyloxy) 1-propanaminium bromide, dimethyl dioctadecyl ammonium bromide (DDAB), dioleoylphosphatidyl ethanolamine (DOPE), dioleoylphosphatidyl choline (DOPC), N(1,2,3-dioleyloxy) propyl-N,N,N-triethylammonium (DOTMA), DOSPA, DMRIE, GL-67, GL-89, Lipofectin, and Lipofectamine (Thiery, et al. Gene Ther. (1997); Felgner, et al., Annals N.Y. Acad. Sci. (1995); Eastman, et al., Hum. Gene Ther. (1997)). Methods of transfection also include nonchemical methods, such as electroporation (Chu et al. (1987), Nucl. Acid. Res. 15(3) 1311-1326), sonoporation (e.g., Kumon, et al (2009), Ultrasound Med Biol. 35(3):494-506), gene gun (e.g., O'Brien and Lummis (2004) Methods 33(2):121-125) and viral transduction (e.g., Flotte and Carter (1995) Gene Ther. 2(6):357-362).

[0689] Activity of the anti-EGFR antibodies, such as modified anti-EGFR antibodies, can be assessed, for example, using any assay that can detect the binding to the surface of the cells. Activity also can be assessed by assessing a functional activity of the anti-EGFR antibodies. In some examples, the assays are based on the biology of the ability of the anti-EGFR antibody to bind to EGFR and mediate some biochemical event, for example effector functions like cellular lysis, phagocytosis, ligand/receptor binding inhibition, inhibition of growth and/or proliferation and apoptosis.

[0690] Such assays often involve monitoring the response of cells to a modified anti-EGFR antibody, for example cell survival, cell death, cellular phagocytosis, cell lysis, change in cellular morphology, or transcriptional activation such as cellular expression of a natural gene or reporter gene. For example, cell proliferation assays, cell death assays, flow cytometry, cell separation techniques, fluorescence activated cell sorting (FACS), phase microscopy, fluorescence microscopy, receptor binding assays, cell signaling assays, immunocytochemistry, reporter gene assays, cellular morphology (e.g., cell volume, nuclear volume, cell perimeter, and nuclear perimeter), ligand binding, substrate binding, nuclease activity, apoptosis, chemotaxis or cell migrations, cell surface marker expression, cellular proliferation, GFP positivity and dye dilution assays (e.g., cell tracker assays with dyes that bind to cell membranes), DNA synthesis assays (e.g., 3H-thymidine and fluorescent DNA-binding dyes such as BrdU or Hoechst dye with FACS analysis) and nuclear foci assays, are all suitable assays to measure the activity of the modified anti-EGFR antibodies provided herein. Other functional activities that can be measured include, but are not limited to, ligand binding, substrate binding, endonuclease and/or exonuclease activity, transcriptional changes to both known and uncharacterized genetic markers (e.g., northern blots), changes in cell metabolism, changes related to cellular proliferation, cell surface marker expression, DNA synthesis, marker and dye dilution assays (e.g., GFP and cell tracker assays), contact inhibition, tumor growth in nude mice, and others.

[0691] For example, anti-EGFR antibodies, such as modified anti-EGFR antibodies, provided herein can be assessed for their modulation of one or more phenotypes of a cell known to express EGFR. Phenotypic assays, kits and reagents for their use are well known to those skilled in the art and are herein used to measure the activity of modified anti-EGFR antibodies. Representative phenotypic assays, which can be purchased from any one of several commercial vendors, include those for determining cell viability, cytotoxicity, proliferation or cell survival (Molecular Probes, Eugene, Oreg.; PerkinElmer, Boston, Mass.), protein-based assays including enzymatic assays (Panvera, LLC, Madison, Wis.; BD Biosciences, Franklin Lakes, N.J.; Oncogene Research Products, San Diego, Calif.), cell regulation, signal transduction, inflammation, oxidative processes and apoptosis (Assay Designs Inc., Ann Arbor, Mich.), triglyceride accumulation (Sigma-Aldrich, St. Louis, Mo.), angiogenesis assays, tube formation assays, cytokine and hormone assays and metabolic assays (Chemicon International Inc., Temecula, Calif.; Amersham Biosciences, Piscataway, N.J.).

[0692] Cells determined to be appropriate for a particular phenotypic assay (i.e., any cell described herein or known in the art to express EGFR) can be treated with a anti-EGFR antibody as well as control antibody. In some examples, EGF, or a fragment thereof, is included so that activation of the receptor is effected. At the end of the treatment period, treated and untreated cells can be analyzed by one or more methods described herein or known in the art. In some examples, activity of the anti-EGFR antibodies provided herein can be assessed by measuring changes in cell morphology, measuring EGFR phosphorylation or cell proliferation.

[0693] The assays can be performed to assess the effects of an anti-EGFR antibody, such as a modified anti-EGFR antibody, on EGFR and/or on cells that express EGFR. In some examples, the activity of EGFR can be stimulated in the presence of EGF or another stimulating agent in the presence or absence of the anti-EGFR antibody provided herein to determine if the antibody modulates (e.g. inhibits) the actions of EGF or another stimulating agent. For example, the anti-EGFR antibody can act by blocking the ability of EGF to interact with EGFR. Thus, the methods of screening herein can permit identification of antagonist anti-EGFR antibodies.

[0694] For example, EGFR phosphorylation assays can be used to measure the ability of the anti-EGFR antibodies provided herein to inhibit phosphorylation of EGFR. Binding of EGF to the extracellular domain of EGFR induces receptor dimerization, and tyrosine phosphorylation, and can result in uncontrolled proliferation (Seshacharyulu et al. (2012) Expert. Opin. Ther. Targets. 16(1):15-31). Anti-EGFR antibodies, such as the modified anti-EGFR antibodies provided herein, can inhibit EGF binding to EGFR and decrease EGFR phosphorylation (see, e.g., U.S. Pat. No. 8,071,093). Thus, activity of a anti-EGFR antibody provided herein can be assessed by detecting phosphorylated EGFR. In some examples, phosphorylated EGFR can be detected in cell lysates by an ELISA assay using methods known in the art or described herein (see, e.g., Example 5 and FIG. 3). The dose-dependence of the modified anti-EGFR antibodies on the inhibitory effect can be determined by plotting the concentration of phosphorylated EGFR against the concentration of modified anti-EGFR antibody. Tyrosine phosphorylated forms of EGFR can be detected using EGFR Phospho ELISA kits available from, e.g., Sigma-Aldrich (St. Louis, Mo.), RAYBIO (Norcross, Ga.) or Thermo Scientific (Rockford, Ill.).

[0695] Growth assays can be used to measure the activity of the modified anti-EGFR antibodies. The assays can measure growth inhibition of cells that express EGFR by an anti-EGFR antibody, such as a modified anti-EGFR antibody. Cells can be incubated for a sufficient time for cells to grow (such as, for example, 12 hours, or 1, 2, 3, 4, 5, 6, 7 days or longer). Cell growth can be measured by any method known in the art, including ³H-thymidine incorporation assay, 5-bromo-2-deoxyuridine (BrdU) ELISA, tetrazolium microplate assay and acid phosphatase assay (e.g., Maghni et al. (1999) J. Immunol. Method. 223(2):185-194). Cell growth can also be measured using kits available from Invitrogen (Cyquant NF cell proliferation assay kit), Cambrex (ViaLight HS (high sensitivity) BioAssay), Promega (CellTiter-Glo Luminescent Cell Viability Assay, Guava Technologies (CellGrowth assay), Stratagene (Quantos cell proliferation assay) (e.g., Assays for Cell Proliferation Studies, Genetic Eng. Biotechnol. News. 26(6)). In some examples, the cell growth can be normalized to growth of cells without antibody. In exemplary growth assays, cells can be added to a well of a 96-well plate in normal growth medium that includes the anti-EGFR antibody to be assayed. An exemplary cell growth assay is described in Example 6.

[0696] 3. Animal Models

[0697] In vivo studies using animal models also can be performed to assess the therapeutic activity of anti-EGFR antibodies, such as modified anti-EGFR antibodies, provided herein. An anti-EGFR antibody can be administered to animal models of the diseases and conditions for which therapy using an anti-EGFR antibody, such as a modified anti-EGFR antibody provided herein, is considered. Such animal models are known in the art, and include, but are not limited to, xenogenic cancer models wherein human cancer explants or passaged xenograft tissues are introduced into immune compromised animals, such as nude or SCID mice, (see e.g., Klein. et al. (1997) Nature Medicine 3:402-408). Efficacy can be predicted using assays that measure inhibition of tumor formation, tumor regression or metastasis. Animal models can also be used to assess side effects of the anti-EGFR antibodies provided herein.

[0698] Various tumor cell lines or tumor animal models are known to one of skill in the art and are described herein. For example, the anti-EGFR antibody can be administered to a tumor-bearing animal, and body weights and tumor volumes monitored. In a further example, to assess adverse side effects, the anti-EGFR antibody can administered to normal animals, and body weights monitored. Activity of the anti-EGFR antibodies can be assessed by monitoring parameters indicative of treatment of a disease or condition that can be treated by administration of anti-EGFR antibodies. provided herein. For example, a parameter indicative of anti-tumorigenicity is shrinkage of tumor size and/or delay in tumor progression. Hence, for example, anti-EGFR antibodies can be assessed to identify those that decrease tumor growth or size. Tumor size can be assessed in vivo in tumor-bearing human or animal models treated with a anti-EGFR antibody. Tumor shrinkage or tumor size can be assessed by various assays known in art, such as, by weight, volume or physical measurement.

[0699] Tumor-bearing animal models can be generated. In vivo tumors can be generated by any known method, including xenograft tumors generated by inoculating or implanting tumor cells (e.g. by subcutaneous injection) into an immunodeficient rodent, syngenic tumors models generated by inoculating (e.g. by subcutaneous injection) a mouse or rat tumor cell line into the corresponding immunocompetent mouse or rat strain, metastatic tumors generated by metastasis of a primary tumor implanted in the animal model, allograft tumors generated by the implantation of tumor cells into same species as the origin of the tumor cells, and spontaneous tumors generated by genetic manipulation of the animal. The tumor models can be generated orthotopically by injection of the tumor cells into the tissue or organ of their origin, for example, implantation of breast tumor cells into a mouse mammary fat pad. In some examples, xenograft models or syngenic models are used. For example, tumors can be established by subcutaneous injection at the right armpit with a tumor cell suspension (e.g. 1×10⁶ to 5×10⁶ cells/animal) into immunocompetent hosts (syngeneic) or immunodeficient hosts (e.g. nude or SCID mice; xenograft). The animal models include models in any organism described herein or known in the art, such as, for example, a mammal, including monkeys and mice.

[0700] The tumor can be syngeneic, allogeneic, or xenogeneic. The tumor can express endogenous or exogenous EGFR. Exogenous EGFR expression can be achieved using methods of recombinant expression known in the art or described herein via transfection or transduction of the cells with the appropriate nucleic acid. Exemplary cell lines include EGFR transfected NIH3T3, MCF7 (human mammary), human epidermoid squamous carcinoma A431, oral squamous cell carcinoma (OSCC) cell line BcaCD885, COLO 356/FG pancreatic cell lines and LS174T colorectal tumors (see e.g., Santon et al., (1986) Cancer Res. 46:4701-05 and Ozawa et al., (1987) Int. J. Cancer 40:706-10; U.S. Pat. Pub. No. 20110111059; Reusch et al. (2006) Clin. Cancer Res. 12(1):183-190; and Yang et al. (2011) Int. J. Nanomedicine 6:1739-1745).

[0701] Anti-EGFR antibodies, such as modified anti-EGFR antibodies, provided herein can be tested in a variety of orthotopic tumor models. These animal models are used by the skilled artisan to study pathophysiology and therapy of aggressive cancers such as, for example, pancreatic, prostate and breast cancer. Immune deprived mice including, but not limited to athymic nude or SCID mice can be used in scoring of local and systemic tumor spread from the site of intraorgan (e.g. pancreas, prostate or mammary gland) injection of human tumor cells or fragments of donor patients.

[0702] In some examples, the testing of anti-EGFR targeting proteins can include study of efficacy in primates (e.g. cynomolgus monkey model) to facilitate the evaluation of depletion of specific target cells harboring EGFR antigen. Additional primate models include but not limited to that of the rhesus monkey.

[0703] For example, the recipient of the tumor can be any suitable murine strain. The recipient can be immunocompetent or immunocompromised in one or more immune-related functions, included but not limited to nu/nu, SCID, and beige mice. Examples of animals in which tumor cells can be transplanted include BALB/c mice, C57BL/6 mice, severe combined immunodeficient/Beige mice (SCID-Beige) (see, e.g., U.S. Pat. Pub. No. 20110111059; Reusch et al. (2006) Clin. Cancer Res. 12(1):183-190; Yang et al. (2011) Int. J. Nanomedicine 6:1739-1745). Other examples include nude mice, SCID mice, xenograft mice, and transgenic mice (including knockins and knockouts). For example, a anti-EGFR antibody provided herein can be tested in a mouse cancer model, for example a xenograft mouse. In this method, a tumor or tumor cell line is grafted onto or injected into a mouse, and subsequently the mouse is treated with an anti-EGFR antibody to determine the ability of the anti-EGFR antibody to reduce or inhibit cancer growth and metastasis. Also contemplated is the use of a SCID murine model in which immune-deficient mice are injected with human peripheral blood lymphocytes (PBLs).

[0704] Exemplary human tumor xenograft models in mice, such as nude or SCID mice, include, but are not limited to, human lung carcinoma (A549 cells, ATCC No. CCL-185); human breast tumor (GI-101A cells, Rathinavelu et al., (1999) Cancer Biochem. Biophys., 17:133-146); human ovarian carcinoma (OVCAR-3 cells, ATCC No. HTB-161); human pancreatic carcinoma (PANC-1cells, ATCC No. CRL-1469 and MIA PaCa-2 cells, ATCC No. CRL-1420); DU145 cells (human prostate cancer cells, ATCC No. HTB-81); human prostate cancer (PC-3 cells, ATCC#CRL-1435); colon carcinoma (HT-29 cells); human melanoma (888-MEL cells, 1858-MEL cells or 1936-MEL cells; see e.g. Wang et al., (2006)1. Invest. Dermatol. 126:1372-1377); and human fibrosarcoma (HT-1080 cells, ATCC No. CCL-121,) and human mesothelioma (MSTO-211H cells). Exemplary rat tumor xenograft models in mice include, but are not limited to, glioma tumor (C6 cells; ATCC No. CCL-107). Exemplary mouse tumor homograft models include, but are not limited to, mouse melanoma (B16-F10 cells; ATCC No. CRL-6475). Exemplary cat tumor xenograft models in mice include, but are not limited to, feline fibrosarcoma (FC77.T cells; ATCC No. CRL-6105). Exemplary dog tumor xenograft models in mice include, but are not limited to, canine osteosarcoma (D17 cells; ATCC No. CCL-183). Non-limiting examples of human xenograft models and syngeneic tumor models are set forth in the Tables 13 and 14 below.

TABLE 13
Human Tumor Xenograft Models

| | Cell | | |
|---|---|---|---|
| Tumor Type | Line Name | Tumor Type | Cell Line |
| Adenoid cystic | ACC-2 | Leukemia | HL-60 |
| carcinoma | | | |
| Bladder carcinoma | EJ | Liver carcinoma | Bel-7402 |
| Bladder carcinoma | T24 | Liver carcinoma | HepG-2 |
| Breast carcinoma | BCaP-37 | Liver carcinoma | QGY-7701 |
| Breast carcinoma | MX-1 | Liver carcinoma | SMMC7721 |
| Cervical carcinoma | SiHa | Lung carcinoma | A549 |
| Cervical carcinoma | Hela | Lung carcinoma | NCI-H460 |
| Colon carcinoma | Ls-174-T | Melanoma | A375 |
| Colon carcinoma | CL187 | Melanoma | M14 |
| Colon carcinoma | HCT-116 | Melanoma | MV3 |
| Colon carcinoma | SW116 | Ovary carcinoma | A2780 |
| Gastric carcinoma | MGC-803 | Pancreatic carcinoma | BXPC-3 |
| Gastric carcinoma | SGC-7901 | Prostate carcinoma | PC-3M |
| Gastric carcinoma | BGC-823 | Tongue carcinoma | Tca-8113 |
| Kidney carcinoma | Ketr-3 | | |

TABLE 14
Syngeneic Mouse Tumor Model

| Tumor Type | Cell Line Name | Strain of Mice |
|---|---|---|
| Cervical carcinoma | U14 | ICR |
| Liver carcinoma | H22 | ICR |
| Lung carcinoma | Lewis | C57BL6 |
| Melanoma | B16F1, B16F10, B16BL6 | C57BL6 |
| Sarcoma | S180 | ICR |

[0705] The route of administration for the anti-EGFR antibodies, such as modified anti-EGFR antibodies, can be any route of administration described herein or known in the art, such as intraperitoneal, intratumoral or intravenous. The anti-EGFR antibodies can be administered at varying dosages described herein or known in the art. For example, the modified anti-EGFR antibodies can be administered to tumor-bearing animals at or between, for example, about 0.1 mg/kg, 0.15 mg/kg, 0.2 mg/kg, 0.25 mg/kg, 0.30 mg/kg, 0.35 mg/kg, 0.40 mg/kg, 0.45 mg/kg, 0.5 mg/kg, 0.55 mg.kg, 0.6 mg/kg, 0.7 mg/kg, 0.8 mg/kg, 0.9 mg/kg, 1.0 mg/kg, 1.1 mg/kg, 1.2 mg/kg, 1.3 mg/kg, 1.4 mg/kg, 1.5 mg/kg, 1.6 mg/kg, 1.7 mg/kg, 1.8 mg/kg, 1.9 mg/kg, 2 mg/kg, 2.5 mg/kg, 3 mg/kg, 3.5 mg/kg, 4 mg/kg, 4.5 mg/kg, 5 mg/kg, 5.5 mg/kg, 6 mg/kg, 6.5 mg/kg, 7 mg/kg, 7.5 mg/kg, 8 mg/kg, 8.5 mg/kg, 9 mg/kg, 9.5 mg/kg, 10 mg/kg, 11 mg/kg, 12 mg/kg, 13 mg/kg, 14 mg/kg, 15 mg/kg, 16 mg/kg, 17 mg/kg, 18 mg/kg, 19 mg/kg, 20 mg/kg, 21 mg/kg, 22 mg/kg, 23 mg/kg, 24 mg/kg, 25 mg/kg, 30 mg/kg, 40 mg/kg, 50 mg/kg, 60 mg/kg, 70 mg/kg, 80 mg/kg, 90 mg/kg, 100 mg/kg or more. In some examples, exemplary dosages include, but are not limited to, about or 0.01 mg/m² to about or 800 mg/m², such as for example, about or 0.01 mg/m², about or 0.1 mg/m², about or 0.5 mg/m², about or 1 mg/m², about or 5 mg/m², about or 10 mg/m², about or 15 mg/m², about or 20 mg/m², about or 25 mg/m², about or 30 mg/m², about or 35 mg/m², about or 40 mg/m², about or 45 mg/m², about or 50 mg/m², about or 100 mg/m², about or 150 mg/m², about or 200 mg/m², about or 250 mg/m², about or 300 mg/m², about or 400 mg/m², about or 500 mg/m², about or 600 mg/m² and about or 700 mg/m². It is understood that one of skill in the art can recognize and convert dosages between units of mg/kg and mg/m² (see, e.g., Michael J. Derelanko, TOXICOLOGIST'S POCKET HANDBOOK, CRC Press, p. 16 (2000)).

[0706] Tumor size and volume can be monitored based on techniques known to one of skill in the art. For example, tumor size and volume can be monitored by radiography, ultrasound imaging, necropsy, by use of calipers, by microCT or by ¹⁸F-FDG-PET. Tumor size also can be assessed visually. In particular examples, tumor size (diameter) is measured directly using calipers. In other examples, tumor volume can be measured using an average of measurements of tumor diameter (D) obtained by caliper or ultrasound assessments. The volume can be determined from the formula V=D³×7t/6 (for diameter measured using calipers); the formula V=[length×(width)²]/2 where length is the longest diameter and width is the shortest diameter perpendicular to length; or V=D²×d×π/6 (for diameter measured using ultrasound where d is the depth or thickness). For example, caliper measurements can be made of the tumor length (l) and width (w) and tumor volume calculated as length×width²×0.52. In another example, microCT scans can be used to measure tumor volume (see e.g. Huang et al. (2009) PNAS, 106:3426-3430). In such an example, mice can be injected with Optiray Pharmacy ioversol injection 74% contrast medium (e.g. 741 mg of ioversol/mL), mice anesthetized, and CT scanning done using a MicroCat 1A scanner or other similar scanner (e.g. IMTek) (40 kV, 600 μA, 196 rotation steps, total angle or rotation=196). The images can be reconstructed using software (e.g. RVA3 software program; ImTek). Tumor volumes can be determined by using available software (e.g. Amira 3.1 software; Mercury Computer Systems). In some examples, the tumor is injected subcutaneously at day 0, and the volume of the primary tumor can be measured at designated time points.

[0707] Once the implanted tumors reach a predetermined size or volume, the modified anti-EGFR antibody can be administered. Progressing tumors can be visualized and tumor size and tumor volume can be measured using any technique known to one of skill in the art. For example, tumor volume or tumor size can be measured using any of the techniques described herein. Tumor volume and size can be assessed or measured at periodic intervals over a period of time following administration of the modified anti-EGFR antibodies provided herein, such as, for example, every hour, every 6 hours, every 12 hours, every 24 hours, every 36 hours, every 2 days, every 3 days, every 4 days, every 5 days, every 6 days, every 7-days, every week, every 3 weeks, every month or more post-infection. A graph of the median change in tumor volume over time can be made. This is exemplified in Example 7. The total area under the curve (AUC) can be calculated. A therapeutic index also can be calculated using the formula AUC_{untreated animals}−AUC_{treated animals}/AUC_{untreated}×100.

[0708] Generally, tumor-bearing animals generated in the same manner, at the same time and with the same type of tumor cells are used as controls. Such control tumor-bearing animals include those that remain untreated (not administered modified anti-EGFR antibody). Additional controls animals include those administered an anti-EGFR antibody known in the art. Exemplary of such anti-EGFR antibodies is Cetuximab. In examples where tumor-bearing animals are administered a known anti-EGFR antibody as a control, the amount of control antibody administered can be the same as the amount of the modified anti-EGFR antibody.

[0709] Assessment of the activity of am anti-EGFR antibody, such as a modified anti-EGFR antibody, can include identifying antibodies that mediate a decrease in tumor size (e.g. diameter), volume or weight compared to control treated or untreated tumor-bearing animals. It is understood that a decrease in tumor size, volume or weight compared to control treated or untreated tumor-bearing animals means that the anti-EGFR antibody itself is mediating tumor regression or shrinkage or that the anti-EGFR antibody is mediating delayed tumor progression compared to control treated or untreated tumor-bearing animals. Tumor shrinkage or delay in tumor progression are parameters indicative of anti-tumorigenicity.

[0710] For example, a anti-EGFR antibody can be selected as mediating a decrease in tumor size or volume based on visual assessment of tumor size in the animal compared to control treated or untreated tumor-bearing animals. In other examples, a anti-EGFR antibody is selected as mediating a decrease in tumor size or volume if the tumor size is decreased in diameter as assessed by any measurement known in the art (e.g. use of calipers) compared to an untreated tumor-bearing animal or compared to a tumor-bearing animal treated with a reference anti-EGFR antibody. It is understood that comparison of tumor size or volume can be made at any predetermined time post-infection, and can be empirically determined by one of skill in the art. In some examples, a comparison can be made at the day in which the untreated control is sacrificed. In other examples, analysis of the total AUC can be made, and AUC values compared as an indicator of the size and volume of the tumor over the time period.

[0711] Effects of an anti-EGFR antibody, such as a modified anti-EGFR antibody, on tumor size or volume can be presented as a ratio of tumor size or volume at a designated time post-administration of the control treated animal compared to the anti-EGFR antibody-treated animal (tumor size or volume of control-treated animals/tumor size or volume of modified anti-EGFR antibody-treated animals). Assessment can include identifying a anti-EGFR antibody that results in animals exhibiting a ratio of tumor shrinkage that is greater than 1.0, for example, that is greater than 1.1, 1.2, 1.3, 1.4, 1.5, 1.6, 1.7, 1.8, 1.9, 2, 3, 4, 5, 6, 7, 8, 9, 10, 20, 30, 40, 50 or more. In particular examples, the results are presented as a ratio of the total AUC area during the course of treatment (AUC of tumor size or volume of control-treated animals/AUC tumor size or volume of modified anti-EGFR antibody-treated animals) A anti-EGFR antibody can be selected that results in a ratio of tumor shrinkage in a subject as measured by AUC that is greater than 1.1, 1.2, 1.3, 1.4, 1.5, 1.6, 1.7, 1.8, 1.9, 2, 3, 4, 5, 6, 7, 8, 9, 10, 20, 30, 40, 50 or more. It is understood that a ratio of 1.2 or 5 means that the modified anti-EGFR antibody effects a decreased tumor size or volume and results in 120% or 500% anti-tumorigenicity activity compared to the reference or control.

[0712] In particular examples, the therapeutic index is determined as a measure of effects of an anti-EGFR antibody, such as a modified anti-EGFR antibody, on tumor size or volume. A anti-EGFR antibody can have a therapeutic index that is at least or about at least or 120%, 130%, 140%, 150%, 160%, 170%, 180%, 190%, 200%, 250%, 300%, 400%, 500%, 600%, 700%, 800% or more compared to the therapeutic index of a control anti-EGFR antibody.

[0713] In additional examples, tumors can be harvested from the animals and weighed. Administration of anti-EGFR antibodies can result in a decrease in tumor weight compared to tumor harvested from control tumor-bearing animals. The weight also can be compared to tumors harvested from control treated animals at the same time post-administration. The change in weight can be presented as a ratio of the tumor weight (tumor weight control treated animals/tumor weights of anti-EGFR-treated animals). A anti-EGFR antibody can result is subjects exhibiting a ratio of tumor weight that is greater than 1.0, for example, that is greater than 1.1, 1.2, 1.3, 1.4, 1.5, 1.6, 1.7, 1.8, 1.9, 2, 3, 4, 5, 6, 7, 8, 9, 10, 20, 30, 40, 50 or more. It is understood that a ratio of tumor weight that is 1.2 or 5 means that the anti-EGFR antibody effects a decreased tumor weight and results in 120% or 500% anti-tumorigenicity activity compared to the reference or control.

[0714] In particular examples, the effect of the anti-EGFR antibody on other organs or tissues in the animal can be assessed. For example, other organs can be harvested from the animals, weighed and/or examined.

[0715] a. Assessing Side Effects

[0716] Studies to assess safety and tolerability also are known in the art and can be used herein. Following administration of a anti-EGFR antibody, such as a modified anti-EGFR antibody, the development of any adverse reactions, such as any adverse reaction described herein or known in the art, can be monitored. Animal studies can be performed to assess adverse side effects, such as side effects that cannot be evaluated in a standard pharmacology profile or occur only after repeated administration of the modified anti-EGFR antibody. In some examples, such assays can be performed in two species—e.g., a rodent and a non-rodent—to ensure that any unexpected adverse effects are not overlooked. In general, these models can measure a variety of toxicities including genotoxicity, chronic toxicity, immunogenicity, reproductive/developmental toxicity, carcinogenicity.

[0717] Other parameters that can be measured to assess side effects include standard measurement of food consumption, bodyweight, antibody formation, clinical chemistry, and macro- and microscopic examination of standard organs/tissues (e.g. cardiotoxicity). Additional parameters of measurement include are injection site trauma and the measurement of any neutralizing antibodies. The anti-EGFR antibodies can be evaluated for cross-reactivity with normal tissues, immunogenicity/antibody production and conjugate or linker toxicity. Such studies can be individualized to address specific concerns and follow the guidance set by ICH S6 (see, e.g., “Preclinical Safety Evaluation Of Biotechnology-Derived Pharmaceuticals,” International Conference on Harmonisation Of Technical Requirements For Registration of Pharmaceuticals For Human Use, July 1997 (addendum June 2011)). As such, the general principles include that the products are sufficiently well characterized and for which impurities/contaminants have been removed, that the test material is comparable throughout development, and GLP compliance.

[0718] The anti-EGFR antibodies, such as modified anti-EGFR antibodies, provided herein can be assessed to identify those that result in subjects exhibiting reduced and/or fewer side effects, such as adverse side effects. For example, the anti-EGFR antibodies can be tested for parameters indicative of their side effects. The reduced side effects of a modified anti-EGFR antibody can include any side effect of anti-EGFR antibodies described herein or known in the art. Side effects can be assessed in healthy animal models or in animal models of a disease or condition, such as the animal models described herein.

[0719] In some examples the subjects are evaluated for properties indicative of a side effect of an anti-EGFR antibody, such as side effects described herein or known in the art, including skin toxicities and hypomagnesemia. For example, side effects of Cetuximab include any described herein and/or known to one of skill in the art, including symptomatic hypomagnesemia, paronychia, fever, dermatologic toxicity, papulopustular rash of the face and upper trunk, hair growth abnormalities, loss of scalp hair, increased growth of facial hair and eyelashes, dry and itchy skin, and periungual inflammation with tenderness (Eng (2009) Nat. Rev. 6:207-218; Schrag et al. J. Natl. Cancer Inst. 97(16):1221-1224; Lacouture, and Melosky (2007) Skin Therapy Lett. 12:1-5). In some examples, the side effects of Cetuximab include dermatological toxicities, including papulopustular eruption, dry skin, pruritus, ocular and nail changes, acneiform skin reaction, acneiform rash, acneiform follicular rash, acne-like rash, maculopapular skin rash, monomorphic pustular lesions, papulopusular reaction. (Lacouture, and Melosky (2007) Skin Therapy Lett. 12, 1-5) Other dermatological toxicities that can be associated with administration of an anti-EGFR antibody, such as Cetuximab include pruritus, erythema and paronychial inflammation. (Lacouture, and Melosky (2007) Skin Therapy Lett. 12, 1-5).

[0720] It is within the ability of the skilled artisan to identify and classify such side effects. In some examples, the side effects of the anti-EGFR antibodies provided herein are assessed by evaluating skin toxicities in animals. For example, as described elsewhere herein, hypomagnesemia can be diagnosed and/or assessed by measurement of serum magnesium levels. Papulopustular rash and acneiform rash can be characterized in animal models, such as mouse models and cynomolugus monkey models, by observing eruptions consisting of papules (a small, raised pimple) and pustules (a small pus filled blister). Dry skin, can be characterized by flaky and dull skin, fine pores, and papery thin skin texture. Skin hyperpigmentation can be characterized by darkening of the skin due to excessive melanin deposition. Pruritus can be evaluated by observing animal scratching. Paronychia can be evaluated by examination. For example, the presence of skin toxicities can be evaluated in mouse models in which human skin is grafted onto mice (see, e.g., Nanney et al. (1996) J. Invest. Dermatol. 106(6): 1169-1174). It addition, dermatologic side effects can be assessed in other animal models. For example, in cynomolugus monkeys, inflammation at the injection site and desquamation of the external integument after cetuximab administration can be assessed. Similar effects can be observed in the epithelial mucosa of the nasal passage, esophagus, and tongue, and degenerative changes in the renal tubular epithelium. Other epithelial toxicities that can be assessed include conjunctivitis, reddened and swollen eyes, and signs of intestinal disturbance (see, e.g., Lutterbuese et al. (2010) Proc. Natl. Acad. Sci. 107(28):12605-12610; European Medicines Agency (2009) Summary of product characteristics (Erbitux)).

[0721] Other adverse reactions that can be assessed in animal models include skin rash, injection site reactions, such as edema or swelling, headache, fever, fatigue, chills, flushing, dizziness, urticaria, wheezing or chest tightness, nausea, vomiting, rigors, back pain, chest pain, muscle cramps, seizures or convulsions, changes in blood pressure and anaphylactic or severe hypersensitivity responses. In some examples, properties indicative of a side effect of a modified anti-EGFR antibody include one or more properties such as survival of the subject, decrease in body weight, existence of side effects such as fever, rash or other allergy, fatigue or abdominal pain, induction of an immune response in the subject, tissue distribution of the antibody. Typically, a range of doses and different dosing frequencies can be administered in the safety and tolerability studies to assess the effect of increasing or decreasing concentrations of anti-EGFR antibody in the dose.

[0722] The type and severity of adverse reactions that develop in a patient or subject after administration of a anti-EGFR antibody provided herein can be assessed and compared to the adverse reactions that develop in a patient or subject after administration of another anti-EGFR antibody, such as any anti-EGFR antibody known in the art or described herein. The differences between adverse reactions that develop after administration of a anti-EGFR antibody provided herein and another anti-EGFR antibody can be assessed.

[0723] Hence, any of the parameters described herein can be assessed as indicative of toxicity/safety of a anti-EGFR antibody. Anti-EGFR antibodies can be selected that result in subjects exhibiting minimal toxicity. In an animal model to assess side effects, the dosages and methods of administration of a anti-EGFR antibody provided herein can include any dosages and methods of administration described herein. Control subjects can include those that are not administered an anti-EGFR antibody, or that are administered a reference anti-EGFR antibody, such as Cetuximab or a variant thereof.

[0724] 5. Pharmacokinetics and Pharmacodynamics Assays

[0725] Pharmacokinetics (PK) and pharmacodynamics (PD) assays of the anti-EGFR antibodies, such as modified anti-EGFR antibodies, provided herein can be performed using methods described herein or known in the art (see, e.g., Klutchko, et al., (1998) J. Med. Chem. 41:3276-3292). Examples of parameters of measurement generally include the maximum (peak) plasma concentration (Cₘₐₓ), the peak time (i.e. when maximum plasma concentration occurs; Tₘₐₓ), the minimum plasma concentration (i.e. the minimum plasma concentration between doses; Cₘᵢₙ), the elimination half-life (T_{1/2}) and area under the curve (i.e. the area under the curve generated by plotting time versus plasma concentration; AUC), following administration. The absolute bioavailability of administered modified anti-EGFR antibody can be determined by comparing the area under the curve following subcutaneous delivery (AUC_{sc}) with the AUC following intravenous delivery (AUCᵢᵥ). Absolute bioavailability (F), can be calculated using the formula: F=([AUC]_{sc}×dose_{sc})/([AUC]ᵢᵥ×doseᵢᵥ). The concentration of anti-EGFR antibody in the plasma following administration can be measured using any method known in the art suitable for assessing concentrations of antibody in samples of blood. Exemplary methods include, but are not limited to, ELISA and nephelometry. Additional measured parameters can include compartmental analysis of concentration-time data obtained following i.v. administration and bioavailability. Biodistribution, dosimetry (for radiolabled antibodies or Fc fusions), and PK studies can also be done in animal models, including animal models described herein or known in the art, including rodent models. Such studies can evaluate tolerance at some or all doses administered, toxicity to local tissues, preferential localization to rodent xenograft animal models and depletion of target cells (e.g. CD20 positive cells). Pharmacodynamic studies can include, but are not limited to, targeting specific tumor cells or blocking signaling mechanisms, measuring depletion of EGFR expressing cells or signals.

[0726] PK and PD assays can be performed in any animal model described herein or known in the art, including healthy animal models, diseased animal models and humans. Screening the modified anti-EGFR antibodies for PD and/or PK properties can be useful for defining the optimal balance of PD, PK, and therapeutic efficacy conferred by the modified anti-EGFR antibodies. For example, it is known in the art that the array of Fc receptors is differentially expressed on various immune cell types, as well as in different tissues. Differential tissue distribution of Fc receptors can affect the pharmacodynamic (PD) and pharmacokinetic (PK) properties of the modified anti-EGFR antibodies provided herein.

[0727] A range of doses and different dosing frequency of dosing can be administered in the pharmacokinetic studies to assess the effect of increasing or decreasing concentrations of the modified anti-EGFR antibody in the dose. Pharmacokinetic properties, such as bioavailability, of the administered modified anti-EGFR antibody, can be assessed with or without co-administration of a therapeutic agent or regimen described herein. For example, dogs, such as beagles, can be administered a modified anti-EGFR antibody alone or with one or more therapeutic agents or regimens described herein. The modified anti-EGFR antibody can be administered before, during or after administration of a therapeutic agent or regimen. Blood samples can then be taken at various time points and the amount of modified anti-EGFR antibody in the plasma determined, such as by nephelometry. The AUC can then be measured and the bioavailability of administered modified anti-EGFR antibody with or without co-administration of the additional therapeutic agent(s) or regimen(s) can be determined. Such studies can be performed to assess the effect of co-administration on pharmacokinetic properties, such as bioavailability, of administered anti-EGFR antibody.

[0728] Single or repeated administration(s) of the modified anti-EGFR antibodies can occur over a dose range of about 6000-fold (about 0.05-300 mg/kg) to evaluate the half-life using plasma concentration and clearance as well as volume of distribution at a steady state and level of systemic absorbance can be measured.

### E. METHODS OF IDENTIFYING GENERATING AND PRODUCING ANTI-EGFR ANTIBODIES

[0729] 1. Identifying Conditionally Therapeutic Proteins

[0730] Conditionally active therapeutic proteins, for example antibodies, such as modified anti-EGFR antibodies provided herein, that are more active in a diseased microenvironment than in a non-diseased microenvironment (such as a healthy or normal environment) can be identified by any assay that permits quantitation of and assessment of activity under conditions present in the different environments. Such assays are described in Section D above. The activity can be compared and those therapeutic proteins that are more active in the diseased microenvironment (or under conditions present in the diseased environment) than in a normal environment (or under conditions present in the non-diseased or normal environment) can be identified. The result is that therapeutic proteins are identified whose activity is conditionally targeted to the diseased microenvironment, such that unwanted systemic effects, such as side effects or unwanted activity, is reduced or minimized.

[0731] As described in detail in Section D, such assays can be performed in vivo or in vitro. For example, assays to identify conditionally active molecules can be performed in vitro by manipulation of one or more conditions of buffers to contain or mimic one or more conditions present in a diseased microenvironment that are different than those present in a non-diseased or healthy or normal environment. For the tumor environment, these conditions include low or acidic pH, such as pH 5.8 to 6.8 (e.g. pH 6.0 to 6.5) and/or elevated lactate concentration (e.g. 10 mM to 16 mM). In contrast, conditions in the non-tumor microenvironment include neutral pH (e.g. pH 7.0 to 7.4) and/or lactate concentration of 1 mM to 5 mM. Exemplary of such assays of identifying conditionally active therapeutic proteins are described in U.S. application Ser. No. 13/200,666 and International Application No. PCT/US11/50891. Also conditions are modeled to simulate or mimic physiologic conditions to include 20-50% serum (vol/vol) or 10-50 mg/mL protein (e.g. serum albumin). Such methods can be used to identify conditionally active anti-cancer agents, including conditionally active antibodies, for example anti-EGFR antibodies, and other agents so that such agents are more active in the tumor. Similar methods also can be performed to identify any conditionally active therapeutic protein, such as anti-inflammatory agents, for example, infliximab (Remicade), etanercept (Enbrel), and other similar agents, in order to reduce systemic immunosuppressive activities.

[0732] 2. Generating and Producing Anti-EGFR Antibodies

[0733] Anti-EGFR antibodies, such as the modified anti-EGFR antibodies provided herein, can be expressed using standard cell culture and other expression systems known in the art. Prior to use in the methods provided herein, the proteins can be purified. Alternatively, whole supernatant or diluted supernatant can be screened in the dual assay herein.

[0734] The anti-EGFR antibodies, such as modified anti-EGFR antibodies, provided herein can be produced by recombinant DNA methods that are within the purview of those skilled in the art. DNA encoding an anti-EGFR antibody can be synthetically produced or can be readily isolated and sequenced using conventional procedures (e.g. by using oligonucleotide probes that are capable of binding specifically to genes encoding the heavy and light chains of the antibody). For example, any cell source known to produce or express an anti-EGFR antibody can serve as a preferred source of such DNA. In another example, once the sequence of the DNA encoding the anti-EGFR is determined, nucleic acid sequences can be constructed using gene synthesis techniques.

[0735] Further, mutagenesis techniques also can be employed to generate modified forms of an anti-EGFR antibody. The DNA also can be modified. For example, gene synthesis or routine molecular biology techniques can be used to effect insertion, deletion, addition or replacement of nucleotides. For example, additional nucleotide sequences can be joined to a nucleic acid sequence. In one example linker sequences can be added, such as sequences containing restriction endonuclease sites for the purpose of cloning the antibody gene into a vector, for example, a protein expression vector. Furthermore, additional nucleotide sequences specifying functional DNA elements can be operatively linked to a nucleic acid molecule. Examples of such sequences include, but are not limited to, promoter sequences designed to facilitate intracellular protein expression, and leader peptide sequences designed to facilitate protein secretion.

[0736] Anti-EGFR antibodies, such as the modified anti-EGFR antibodies provided herein, can be expressed as full-length proteins or less then full length proteins. For example, antibody fragments can be expressed. Nucleic acid molecules and proteins provided herein can be made by any method known to one of skill in the art. Such procedures are routine and are well known to the skill artisan. They include routine molecular biology techniques including gene synthesis, PCR, ligation, cloning, transfection and purification techniques. A description of such procedures is provided below.

[0737] Once isolated, the DNA can be placed into expression vectors, which are then transfected into host cells. Choice of vector can depend on the desired application. For example, after insertion of the nucleic acid, the vectors typically are used to transform host cells, for example, to amplify the protein genes for replication and/or expression thereof. In such examples, a vector suitable for high level expression is used.

[0738] For expression of antibodies, generally, nucleic acid encoding the heavy chain of an antibody is cloned into a vector and the nucleic acid encoding the light chain of an antibody is cloned into a vector. The genes can be cloned into a single vector for dual expression thereof, or into separate vectors. If desired, the vectors also can contain further sequences encoding additional constant region(s) or hinge regions to generate other antibody forms. The vectors can be transfected and expressed in host cells. Expression can be in any cell expression system known to one of skill in the art. For example, host cells include cells that do not otherwise produce immunoglobulin protein, to obtain the synthesis of antibodies in the recombinant host cells. For example, host cells include, but not limited to simian COS cells, Chinese hamster ovary (CHO) cells, 293FS cells, HEK293-6E cells, NSO cells or other myeloma cells. Other expression vectors and host cells are described herein.

[0739] In one example, nucleic acid encoding the heavy chain of an antibody, is ligated into a first expression vector and nucleic acid encoding the light chain of an antibody is ligated into a second expression vector. The expression vectors can be the same or different, although generally they are sufficiently compatible to allow comparable expression of proteins (heavy and light chain) therefrom. The first and second expression vectors are generally co-transfected into host cells, typically at a 1:1 ratio. Exemplary of vectors include, but are not limited to, pγIHC and pκLC (Tiller et al. (2008) J Immunol. Methods, 329:112-24). Other expression vectors include the light chain expression vector pAG4622 and the heavy chain expression vector pAH4604 (Coloma et al. (1992) J Immunol. Methods, 152:89-104). The pAG4622 vector contains the genomic sequence encoding the C-region domain of the human κ L chain and the gpt selectable marker. The pAH4604 vectors contains the hisD selectable marker and sequences encoding the human H chain γ1 C-region domain. In another example, the heavy and light chain can be cloned into a single vector that has expression cassettes for both the heavy and light chain.

[0740] Hence, anti-EGFR antibodies, such as modified anti-EGFR antibodies, provided herein can be generated or expressed as full-length antibodies or as antibodies that are less than full length, including, but not limited to antigen-binding fragments thereof, such as, for example, Fab, Fab′, Fab hinge, F(ab′)₂, single-chain Fv (scFv), scFv tandem, Fv, dsFv, scFv hinge, scFv hinge (ΔE) diabody, Fd and Fd′ fragments. Various techniques have been developed for the production of antibody fragments. Traditionally, these fragments were derived via proteolytic digestion of intact antibodies (see e.g. Morimoto et al. (1992) Journal of Biochemical and Biophysical Methods, 24:107-117; Brennance et al. (1985) Science, 229:81). Fragments also can be produced directly by recombinant host cells. For example, Fab, Fv and scFv antibody fragments can all be expressed in and secreted from host cells, such as E. coli, thus allowing the facile production of large amounts of these fragments. Also, Fab′-SH fragments can be chemically coupled to form F(ab′)₂ fragments (Carter et al. (1992) Bio/Technology, 10:163-167). According to another approach, F(ab′)₂ fragments can be isolated directly from recombinant host cell culture. In some examples, the modified anti-EGFR antibody is a single chain Fv fragment (scFv) (see e.g. WO93/16185; U.S. Pat. No. 5,571,894 and U.S. Pat. No. 5,587,458). Fv and scFv are the only species with intact combining sites that are devoid of constant regions; thus, they are suitable for reduced nonspecific binding during in vivo use. scFv fusion proteins can be constructed to yield fusion of an effector protein at either the amino or the carboxy terminus of an scFv. The antibody fragment can also be a linear antibody (see e.g. U.S. Pat. No. 5,641,870). Such linear antibody fragments can be monospecific or bispecific. Other techniques for the production of antibody fragments are known to one of skill in the art.

[0741] For example, upon expression, antibody heavy and light chains pair by disulfide bond to form a full-length antibody or fragments thereof. For example, for expression of a full-length Ig, sequences encoding the V_{H}-C_{H}1-hinge-C_{H}2-C_{H}3 can be cloned into a first expression vector and sequences encoding the V_{L}-C_{L} domains can be cloned into a second expression vector. Upon co-expression with the second expression vector encoding the V_{L}-C_{L} domains, a full-length antibody is expressed. In another example, to generate a Fab, sequences encoding the V_{H}-C_{H}1 can be cloned into a first expression vector and sequences encoding the V_{L}-C_{L} domains can be cloned into a second expression vector. The heavy chain pairs with a light chain and a Fab monomer is generated. Sequences of C_{H}1, hinge, C_{H}2 and/or C_{H}3 of various IgG sub-types are known to one of skill in the art (see e.g. U.S. Published Application No. 20080248028). Similarly, sequences of C_{L}, lambda or kappa, also are known (see e.g. U.S. Published Application No. 20080248028). Exemplary of such sequences are provided herein.

[0742] Exemplary sequences that can be inserted into vectors for expression of whole antibodies and antibody fragments include sequences of antibody fragments described herein (see, e.g., and SEQ ID NOS:30-1068, 1093, 1098-1107, 1112-1131 and 1134-1159). For example, the variable heavy chain and variable light chain sequences of Cetuximab (SEQ ID NOS: 3 and 4, respectively) or the variable heavy chain and variable light chain sequences of any antibody as described herein (e.g., SEQ ID NOS: 30-1068, 1093, 1098-1107, 1112-1131 and 1134-1159, respectively) can be inserted into a suitable expression vector described herein or known to one of skill in the art. All or a portion of the constant region of the heavy chain or light chain also can be inserted or contained in the vector for expression of IgG antibodies or fragments thereof. In addition, V_{H}-C_{H}1 and V_{L}-C_{L} sequences can be inserted into a suitable expression vector for expression of Fab molecules. Variable heavy chain and variable light chain domains of an antibody (i.e., SEQ ID NOS: 30-1068, 1093, 1098-1107, 1112-1131 and 1134-1159, respectively) can be expressed in a suitable expression vector, such as a vector encoding for a linker between the variable heavy chain and variable light chain to produce single chain antibodies. Exemplary linkers include the glycine rich flexible linkers (-G₄S—)ₙ, where n is a positive integer, such as 1 (SEQ ID NO:1094), 2 (SEQ ID NO:1095), 3 (SEQ ID NO: 21), 4 (SEQ ID NO: 1096), 5 (SEQ ID NO: 1097), or more.

[0743] a. Vectors

[0744] Choice of vector can depend on the desired application. Many expression vectors are available and known to those of skill in the art for the expression of anti-EGFR antibodies or portions thereof, such as antigen binding fragments. The choice of an expression vector is influenced by the choice of host expression system. Such selection is well within the level of skill of the skilled artisan. In general, expression vectors can include transcriptional promoters and optionally enhancers, translational signals, and transcriptional and translational termination signals. Expression vectors that are used for stable transformation typically have a selectable marker which allows selection and maintenance of the transformed cells. In some cases, an origin of replication can be used to amplify the copy number of the vectors in the cells. Vectors also generally can contain additional nucleotide sequences operably linked to the ligated nucleic acid molecule (e.g. His tag, Flag tag). For applications with antibodies, vectors generally include sequences encoding the constant region. Thus, antibodies or portions thereof also can be expressed as protein fusions. For example, a fusion can be generated to add additional functionality to a polypeptide. Examples of fusion proteins include, but are not limited to, fusions of a signal sequence, an epitope tag such as for localization, e.g. a His₆ tag or a myc tag, or a tag for purification, for example, a GST fusion, and a sequence for directing protein secretion and/or membrane association.

[0745] For example, expression of the anti-EGFR antibodies, such as modified anti-EGFR antibodies, can be controlled by any promoter/enhancer known in the art. Suitable bacterial promoters are well known in the art and described herein below. Other suitable promoters for mammalian cells, yeast cells and insect cells are well known in the art and some are exemplified below. Selection of the promoter used to direct expression of a heterologous nucleic acid depends on the particular application. Promoters which can be used include but are not limited to eukaryotic expression vectors containing the SV40 early promoter (Bernoist and Chambon, Nature 290:304-310 (1981)), the promoter contained in the 3′ long terminal repeat of Rous sarcoma virus (Yamamoto et al. Cell 22:787-797 (1980)), the herpes thymidine kinase promoter (Wagner et al., Proc. Natl. Acad. Sci. USA 78:1441-1445 (1981)), the regulatory sequences of the metallothionein gene (Brinster et al., Nature 296:39-42 (1982)); prokaryotic expression vectors such as the β-lactamase promoter (Jay et al., (1981) Proc. Natl. Acad. Sci. USA 78:5543) or the tac promoter (DeBoer et al., Proc. Natl. Acad. Sci. USA 80:21-25 (1983)); see also “Useful Proteins from Recombinant Bacteria”: in Scientific American 242:79-94 (1980)); plant expression vectors containing the nopaline synthetase promoter (Herrera-Estrella et al., Nature 303:209-213 (1984)) or the cauliflower mosaic virus 35S RNA promoter (Gardner et al., Nucleic Acids Res. 9:2871 (1981)), and the promoter of the photosynthetic enzyme ribulose bisphosphate carboxylase (Herrera-Estrella et al., Nature 310:115-120 (1984)); promoter elements from yeast and other fungi such as the Gal4 promoter, the alcohol dehydrogenase promoter, the phosphoglycerol kinase promoter, the alkaline phosphatase promoter, and the following animal transcriptional control regions that exhibit tissue specificity and have been used in transgenic animals: elastase I gene control region which is active in pancreatic acinar cells (Swift et al., Cell 38:639-646 (1984); Ornitz et al., Cold Spring Harbor Symp. Quant. Biol. 50:399-409 (1986); MacDonald, Hepatology 7:425-515 (1987)); insulin gene control region which is active in pancreatic beta cells (Hanahan et al., Nature 315:115-122 (1985)), immunoglobulin gene control region which is active in lymphoid cells (Grosschedl et al., Cell 38:647-658 (1984); Adams et al., Nature 318:533-538 (1985); Alexander et al., Mol. Cell Biol. 7:1436-1444 (1987)), mouse mammary tumor virus control region which is active in testicular, breast, lymphoid and mast cells (Leder et al., Cell 45:485-495 (1986)), albumin gene control region which is active in liver (Pinkert et al., Genes and Devel. 1:268-276 (1987)), alpha-fetoprotein gene control region which is active in liver (Krumlauf et al., Mol. Cell. Biol. 5:1639-1648 (1985); Hammer et al., Science 235:53-58 1987)), alpha-1 antitrypsin gene control region which is active in liver (Kelsey et al., Genes and Devel. 1:161-171 (1987)), beta globin gene control region which is active in myeloid cells (Magram et al., Nature 315:338-340 (1985); Kollias et al., Cell 46:89-94 (1986)), myelin basic protein gene control region which is active in oligodendrocyte cells of the brain (Readhead et al., Cell 48:703-712 (1987)), myosin light chain-2 gene control region which is active in skeletal muscle (Shani, Nature 314:283-286 (1985)), and gonadotrophic releasing hormone gene control region which is active in gonadotrophs of the hypothalamus (Mason et al., Science 234:1372-1378 (1986)).

[0746] In addition to the promoter, the expression vector typically contains a transcription unit or expression cassette that contains all the additional elements required for the expression of the antibody, or portion thereof, in host cells. A typical expression cassette contains a promoter operably linked to the nucleic acid sequence encoding the protein and signals required for efficient polyadenylation of the transcript, ribosome binding sites and translation termination. Additional elements of the cassette can include enhancers. In addition, the cassette typically contains a transcription termination region downstream of the structural gene to provide for efficient termination. The termination region can be obtained from the same gene as the promoter sequence or can be obtained from different genes.

[0747] Some expression systems have markers that provide gene amplification such as thymidine kinase and dihydrofolate reductase. Alternatively, high yield expression systems not involving gene amplification are also suitable, such as using a baculovirus vector in insect cells, with a nucleic acid sequence encoding a protein under the direction of the polyhedron promoter or other strong baculovirus promoter.

[0748] For purposes herein with respect to expression of anti-EGFR antibodies, such as modified anti-EGFR antibodies, vectors can contain a sequence of nucleotides that encodes a constant region of an antibody operably linked to the nucleic acid sequence encoding the variable region of the antibody. The vector can include the sequence for one or all of a C_{H}1, C_{H}2, hinge, C_{H}3 or C_{H}4 and/or C_{L}. Generally, such as for expression of Fabs, the vector contains the sequence for a C_{H}1 or C_{L} (kappa or lambda light chains). The sequences of constant regions or hinge regions are known to one of skill in the art (see e.g. U.S. Published Application No. 20080248028). Exemplary of such sequences are provided herein.

[0749] Exemplary expression vectors include any mammalian expression vector such as, for example, pCMV. For bacterial expression, such vectors include pBR322, pUC, pSKF, pET23D, and fusion vectors such as MBP, GST and LacZ. Other eukaryotic vectors, for example any containing regulatory elements from eukaryotic viruses can be used as eukaryotic expression vectors. These include, for example, SV40 vectors, papilloma virus vectors, and vectors derived from Epstein-Bar virus. Exemplary eukaryotic vectors include pMSG, pAV009/A+, pMT010/A+, pMAMneo-5, baculovirus pDSCE, and any other vector allowing expression of proteins under the direction of the CMV promoter, SV40 early promoter, SV40 late promoter, metallothionein promoter, murine mammary tumor virus promoter, Rous sarcoma virus promoter, polyhedron promoter, or other promoters shown effective for expression in eukaryotes.

[0750] Any methods known to those of skill in the art for the insertion of DNA fragments into a vector can be used to construct expression vectors containing a nucleic acid encoding a protein or an antibody chain. These methods can include in vitro recombinant DNA and synthetic techniques and in vivo recombinants (genetic recombination). The insertion into a cloning vector can, for example, be accomplished by ligating the DNA fragment into a cloning vector which has complementary cohesive termini. If the complementary restriction sites used to fragment the DNA are not present in the cloning vector, the ends of the DNA molecules can be enzymatically modified. Alternatively, any site desired can be produced by ligating nucleotide sequences (linkers) onto the DNA termini; these ligated linkers can contain specific chemically synthesized nucleic acids encoding restriction endonuclease recognition sequences.

[0751] b. Cells and Expression Systems

[0752] Generally, any cell type that can be engineered to express heterologous DNA and has a secretory pathway is suitable for expression of the modified anti-EGFR antibodies provided herein. Expression hosts include prokaryotic and eukaryotic organisms such as bacterial cells (e.g. E. coli), yeast cells, fungal cells, Archea, plant cells, insect cells and animal cells including human cells. Expression hosts can differ in their protein production levels as well as the types of post-translational modifications that are present on the expressed proteins. Further, the choice of expression host is often related to the choice of vector and transcription and translation elements used. For example, the choice of expression host is often, but not always, dependent on the choice of precursor sequence utilized. For example, many heterologous signal sequences can only be expressed in a host cell of the same species (i.e., an insect cell signal sequence is optimally expressed in an insect cell). In contrast, other signal sequences can be used in heterologous hosts such as, for example, the human serum albumin (hHSA) signal sequence which works well in yeast, insect, or mammalian host cells and the tissue plasminogen activator pre/pro sequence which has been demonstrated to be functional in insect and mammalian cells (Tan et al., (2002) Protein Eng. 15:337). The choice of expression host can be made based on these and other factors, such as regulatory and safety considerations, production costs and the need and methods for purification. Thus, the vector system must be compatible with the host cell used.

[0753] Expression in eukaryotic hosts can include expression in yeasts such as Saccharomyces cerevisiae and Pichia pastoris, insect cells such as Drosophila cells and lepidopteran cells, plants and plant cells such as tobacco, corn, rice, algae, and lemna. Eukaryotic cells for expression also include mammalian cells lines such as Chinese hamster ovary (CHO) cells or baby hamster kidney (BHK) cells. Eukaryotic expression hosts also include production in transgenic animals, for example, including production in serum, milk and eggs.

[0754] Recombinant molecules can be introduced into host cells via, for example, transformation, transfection, infection, electroporation and sonoporation, so that many copies of the gene sequence are generated. Generally, standard transfection methods are used to produce bacterial, mammalian, yeast, or insect cell lines that express large quantity of antibody chains, which is then purified using standard techniques (see e.g., Colley et al. (1989) J. Biol. Chem., 264:17619-17622; Guide to Protein Purification, in Methods in Enzymology, vol. 182 (Deutscher, ed.), 1990). Transformation of eukaryotic and prokaryotic cells are performed according to standard techniques (see, e.g., Morrison (1977) J. Bact. 132:349-351; Clark-Curtiss and Curtiss (1983) Methods in Enzymology, 101, 347-362). For example, any of the well-known procedures for introducing foreign nucleotide sequences into host cells can be used. These include the use of calcium phosphate transfection, polybrene, protoplast fusion, electroporation, biolistics, liposomes, microinjection, plasma vectors, viral vectors and any other the other well known methods for introducing cloned genomic DNA, cDNA, synthetic DNA or other foreign genetic material into a host cell. Generally, for purposes of expressing an antibody, host cells are transfected with a first vector encoding at least a V_{H} chain and a second vector encoding at least a V_{L} chain. Thus, it is only necessary that the particular genetic engineering procedure used be capable of successfully introducing at least both genes into the host cell capable of expressing antibody polypeptide, or modified form thereof.

[0755] Anti-EGFR antibodies, such as modified anti-EGFR antibodies, provided herein can be produced by any methods known in the art for protein production including in vitro and in vivo methods such as, for example, the introduction of nucleic acid molecules encoding antibodies into a host cell or host animal and expression from nucleic acid molecules encoding recombined antibodies in vitro. Prokaryotes, especially E. coli, provide a system for producing large amounts of reassembled antibodies or portions thereof, and are particularly desired in applications of expression and purification of proteins. Transformation of E. coli is a simple and rapid technique well known to those of skill in the art. E. coli host strains for high throughput expression include, but are not limited to, BL21 (EMD Biosciences) and LMG194 (ATCC). Exemplary of such an E. coli host strain is BL21. Vectors for high throughput expression include, but are not limited to, pBR322 and pUC vectors.

[0756] i. Prokaryotic Expression

[0757] Prokaryotes, especially E. coli, provide a system for producing large amounts of modified anti-EGFR antibodies, or portions thereof. Transformation of E. coli is a simple and rapid technique well known to those of skill in the art. Expression vectors for E. coli can contain inducible promoters that are useful for inducing high levels of protein expression and for expressing antibodies that exhibit some toxicity to the host cells. Examples of inducible promoters include the lac promoter, the trp promoter, the hybrid tac promoter, the T7 and SP6 RNA promoters and the temperature regulated λP_{L} promoter.

[0758] Antibodies or portions thereof can be expressed in the cytoplasmic environment of E. coli. The cytoplasm is a reducing environment and for some antibodies, this can result in the formation of insoluble inclusion bodies. Reducing agents such as dithiothreitol and β-mercaptoethanol and denaturants (e.g., such as guanidine-HCl and urea) can be used to resolubilize the antibodies. An exemplary alternative approach is the expression of recombined antibodies or fragments thereof in the periplasmic space of bacteria which provides an oxidizing environment and chaperonin-like and disulfide isomerases leading to the production of soluble protein. Typically, a leader sequence is fused to the protein to be expressed which directs the protein to the periplasm. The leader is then removed by signal peptidases inside the periplasm. Exemplary pathways to translocate expressed proteins into the periplasm are the Sec pathway, the SRP pathway and the TAT pathway. Examples of periplasmic-targeting leader sequences include the pelB leader from the pectate lyase gene, the StII leader sequence, and the DsbA leader sequence. In some cases, periplasmic expression allows leakage of the expressed protein into the culture medium. The secretion of antibodies allows quick and simple purification from the culture supernatant. Antibodies that are not secreted can be obtained from the periplasm by osmotic lysis. Similar to cytoplasmic expression, in some cases proteins can become insoluble and denaturants and reducing agents can be used to facilitate solubilization and refolding. Temperature of induction and growth also can influence expression levels and solubility. Typically, temperatures between 25° C. and 37° C. are used. Mutations also can be used to increase solubility of expressed proteins. Typically, bacteria produce aglycosylated proteins. Thus, glycosylation can be added in vitro after purification from host cells.

[0759] ii. Yeast

[0760] Yeasts such as Saccharomyces cerevisiae, Schizosaccharomyces pombe, Yarrowia lipolytica, Kluyveromyces lactis, and Pichia pastoris are useful expression hosts for recombined antibodies or portions thereof. Yeast can be transformed with episomal replicating vectors or by stable chromosomal integration by homologous recombination. Typically, inducible promoters are used to regulate gene expression. Examples of such promoters include AOX1, GAL1, GAL5, and GAL5 and metallothionein promoters such as CUP 1. Expression vectors often include a selectable marker such as LEU2, TRP1, HIS3, and URA3 for selection and maintenance of the transformed DNA. Proteins expressed in yeast are often soluble. Co-expression with chaperonins such as Bip and protein disulfide isomerase can improve expression levels and solubility. Additionally, proteins expressed in yeast can be directed for secretion using secretion signal peptide fusions such as the yeast mating type alpha-factor secretion signal from Saccharomyces cerevisae and fusions with yeast cell surface proteins such as the Aga2p mating adhesion receptor or the Arxula adeninivorans glucoamylase. A protease cleavage site such as for the Kex-2 protease, can be engineered to remove the fused sequences from the expressed polypeptides as they exit the secretion pathway. Yeast also is capable of glycosylation at Asn-X-Ser/Thr motifs.

[0761] iii. Insects

[0762] Insect cells, particularly using baculovirus expression, are useful for expressing modified anti-EGFR antibodies or portions thereof. Insect cells express high levels of protein and are capable of most of the post-translational modifications used by higher eukaryotes. Baculovirus have a restrictive host range which can improve the safety and reduce regulatory concerns of eukaryotic expression. Typical expression vectors use a promoter for high level expression such as the polyhedrin promoter and p10 promoter of baculovirus. Commonly used baculovirus systems include the baculoviruses such as Autographa californica nuclear polyhedrosis virus (AcNPV), and the Bombyx mori nuclear polyhedrosis virus (BmNPV) and an insect cell line such as Sf9 derived from Spodoptera frugiperda and TN derived from Trichoplusia ni. For high-level expression, the nucleotide sequence of the molecule to be expressed can be fused immediately downstream of the polyhedrin initiation codon of the virus. To generate baculovirus recombinants capable of expressing human antibodies, a dual-expression transfer, such as pAcUW51 (PharMingen) is utilized. Mammalian secretion signals are accurately processed in insect cells and can be used to secrete the expressed protein into the culture medium.

[0763] An alternative expression system in insect cell for expression of the modified anti-EGFR antibodies provided herein is the use of stably transformed cells. Cell lines such as Sf9 derived cells from Spodoptera frugiperda and TN derived cells from Trichoplusia ni can be used for expression. The baculovirus immediate early gene promoter 1E1 can be used to induce consistent levels of expression. Typical expression vectors include the pIE1-3 and pI31-4 transfer vectors (Novagen). Expression vectors are typically maintained by the use of selectable markers such as neomycin and hygromycin.

[0764] iv. Mammalian Cells

[0765] Mammalian expression systems can be used to express anti-EGFR antibodies, such as modified anti-EGFR antibodies, including antigen-binding fragments thereof. Expression constructs can be transferred to mammalian cells by viral infection such as adenovirus or by direct DNA transfer such as liposomes, calcium phosphate, DEAE-dextran and by physical means such as electroporation and microinjection. Expression vectors for mammalian cells typically include an mRNA cap site, a TATA box, a translational initiation sequence (Kozak consensus sequence) and polyadenylation elements. Such vectors often include transcriptional promoter-enhancers for high-level expression, for example the SV40 promoter-enhancer, the human cytomegalovirus (CMV) promoter and the long terminal repeat of Rous sarcoma virus (RSV). These promoter-enhancers are active in many cell types. Tissue and cell-type promoters and enhancer regions also can be used for expression. Exemplary promoter/enhancer regions include, but are not limited to, those from genes such as elastase I, insulin, immunoglobulin, mouse mammary tumor virus, albumin, alpha fetoprotein, alpha 1 antitrypsin, beta globin, myelin basic protein, myosin light chain 2, and gonadotropic releasing hormone gene control. Selectable markers can be used to select for and maintain cells with the expression construct. Examples of selectable marker genes include, but are not limited to, hygromycin B phosphotransferase, adenosine deaminase, xanthine-guanine phosphoribosyl transferase, aminoglycoside phosphotransferase, dihydrofolate reductase and thymidine kinase. Modified anti-EGFR antibodies can be produced, for example, using a NEO^{R}/G418 system, a dihydrofolate reductase (DHFR) system or a glutamine synthetase (GS) system. The GS system uses joint expression vectors, such as pEE 12/pEE6, to express both heavy chain and light chain. Fusion with cell surface signaling molecules such as TCR-ζ and Fc_{∈}RI-γ can direct expression of the proteins in an active state on the cell surface.

[0766] Many cell lines are available for mammalian expression including mouse, rat human, monkey, chicken and hamster cells. Exemplary cell lines include any known in the art or described herein, such as, for example, CHO, Balb/3T3, HeLa, MT2, mouse NS0 (nonsecreting) and other myeloma cell lines, hybridoma and heterohybridoma cell lines, lymphocytes, fibroblasts, Sp2/0, COS, NIH3T3, HEK293, 293S, 2B8, and HKB cells. Cell lines adapted to serum-free media which facilitates purification of secreted proteins from the cell culture media are also available. One such example is the serum free EBNA-1 cell line (Pham et al., (2003) Biotechnol. Bioeng. 84:332-42.)

[0767] v. Plants

[0768] Transgenic plant cells and plants can be used to express anti-EGFR antibodies, such as modified anti-EGFR antibodies, or a portion thereof described herein. Expression constructs are typically transferred to plants using direct DNA transfer such as microprojectile bombardment and PEG-mediated transfer into protoplasts, and with agrobacterium-mediated transformation. Expression vectors can include promoter and enhancer sequences, transcriptional termination elements and translational control elements. Expression vectors and transformation techniques are usually divided between dicot hosts, such as Arabidopsis and tobacco, and monocot hosts, such as corn and rice. Examples of plant promoters used for expression include the cauliflower mosaic virus CaMV 35S promoter, the nopaline synthase promoter, the ribose bisphosphate carboxylase promoter and the maize ubiquitin-1 (ubi-1) promoter promoters. Selectable markers such as hygromycin, phosphomannose isomerase and neomycin phosphotransferase are often used to facilitate selection and maintenance of transformed cells. Transformed plant cells can be maintained in culture as cells, aggregates (callus tissue) or regenerated into whole plants. Transgenic plant cells also can include algae engineered to produce proteases or modified proteases (see for example, Mayfield et al. (2003) PNAS 100:438-442). Because plants have different glycosylation patterns than mammalian cells, this can influence the choice of protein produced in these hosts.

[0769] 3. Purification

[0770] Anti-EGFR antibodies, such as modified anti-EGFR antibodies and antigen binding portions thereof, can be purified by any procedure known to one of skill in the art or described herein. Proteins can be purified to substantial purity using standard protein purification techniques known in the art including but not limited to, SDS-PAGE, size fraction and size exclusion chromatography, ammonium sulfate precipitation, chelate chromatography, ionic exchange chromatography or column chromatography. For example, antibodies can be purified by column chromatography. Exemplary of a method to purify the anti-EGFR antibodies provided herein is by using column chromatography, wherein a solid support column material is linked to Protein G, a cell surface-associated protein from Streptococcus, that binds immunoglobulins with high affinity. In some examples, the anti-EGFR antibodies can be purified by column chromatography, wherein a solid support column material is linked to Protein A, a cell surface-associated protein from Staphylococcus that binds immunoglobulins, such as IgG antibodies, with high affinity (see, e.g., Liu et al. (2010) MAbs 2(5):480-499). Other immunoglobulin-binding bacterial proteins that can be used to purify the anti-EGFR antibodies provided herein include Protein A/G, a recombinant fusion protein that combines the

[0771] IgG binding domains of Protein A and Protein G; and Protein L, a surface protein from Peptostreptococcus (Bjorck (1988) J. Immunol., 140(4):1194-1197; Kastern, et al. (1992) J. Biol. Chem. 267(18):12820-12825; Eliasson et al. (1988) J. Biol. Chem. 263:4323-4327).

[0772] The anti-EGFR antibodies can be purified to 60%, 70%, 80% purity and typically at least 90%, 91%, 92%, 93%, 94%, 95%, 96%, 97%, 98% or 99% purity. Purity can be assessed by standard methods such as by SDS-PAGE and coomassie staining.

[0773] Methods for purification of anti-EGFR antibodies, including antibodies or portions thereof from host cells depend on the chosen host cells and expression systems. For secreted molecules, proteins are generally purified from the culture media after removing the cells. For intracellular expression, cells can be lysed and the proteins purified from the extract. When transgenic organisms such as transgenic plants and animals are used for expression, tissues or organs can be used as starting material to make a lysed cell extract. Additionally, transgenic animal production can include the production of polypeptides in milk or eggs, which can be collected, and if necessary further the proteins can be extracted and further purified using standard methods in the art.

[0774] When proteins are expressed by transformed bacteria in large amounts, typically after promoter induction, although expression can be constitutive, the polypeptides can form insoluble aggregates. There are several protocols that are suitable for purification of polypeptide inclusion bodies known to one of skill in the art. Numerous variations will be apparent to those of skill in the art.

[0775] For example, in one method, the cell suspension is generally centrifuged and the pellet containing the inclusion bodies resuspended in buffer which does not dissolve but washes the inclusion bodies, e.g., 20 mM Tris-HCl (pH 7.2), 1 mM EDTA, 150 mM NaCl and 2% Triton-X 100, a non-ionic detergent. It can be necessary to repeat the wash step to remove as much cellular debris as possible. The remaining pellet of inclusion bodies can be resuspended in an appropriate buffer (e.g., 20 mM sodium phosphate, pH 6.8, 150 mM NaCl). Other appropriate buffers are apparent to those of skill in the art.

[0776] Alternatively, antibodies can be purified from bacteria periplasm. Where the antibody is exported into the periplasm of the bacteria, the periplasmic fraction of the bacteria can be isolated by cold osmotic shock in addition to other methods known to those of skill in the art. For example, in one method, to isolate recombinant polypeptides from the periplasm, the bacterial cells are centrifuged to form a pellet. The pellet can be resuspended in a suitable buffer containing 20% sucrose. To lyse the cells, the bacteria can be centrifuged and the pellet resuspended in ice-cold 5 mM MgSO₄ and kept in an ice bath for approximately 10 minutes. The cell suspension is centrifuged and the supernatant decanted and saved. Recombinant anti-EGFR antibodies present in the supernatant can be separated from the host proteins by standard separation techniques well known to those of skill in the art, such as the separation techniques described herein. These methods include, but are not limited to, the following steps: solubility fractionation, size differential filtration, and column chromatography.

### F. PHARMACEUTICAL COMPOSITIONS, FORMULATIONS, KITS, ARTICLES OF MANUFACTURE AND COMBINATIONS

[0777] 1. Pharmaceutical Compositions and Formulations

[0778] Pharmaceutical compositions of any of anti-EGFR antibodies, such as modified anti-EGFR antibodies, or antigen-binding fragment thereof, are provided herein for administration. Pharmaceutically acceptable compositions are prepared in view of approvals for a regulatory agency or other agency prepared in accordance with generally recognized pharmacopeia for use in animals and in humans. Typically, the compounds are formulated into pharmaceutical compositions using techniques and procedures well known in the art (see e.g., Ansel Introduction to Pharmaceutical Dosage Forms, Fourth Edition, 1985, 126).

[0779] The pharmaceutical composition can be used for therapeutic, prophylactic, and/or diagnostic applications. The anti-EGFR antibodies provided herein can be formulated with a pharmaceutical acceptable carrier or diluent. Generally, such pharmaceutical compositions utilize components which will not significantly impair the biological properties of the antibody, such as the binding of to its specific epitope (e.g. binding to EGFR). Each component is pharmaceutically and physiologically acceptable in the sense of being compatible with the other ingredients and not injurious to the patient. The formulations can conveniently be presented in unit dosage form and can be prepared by methods well known in the art of pharmacy, including but not limited to, tablets, pills, powders, liquid solutions or suspensions (e.g., including injectable, ingestible and topical formulations (e.g., eye drops, gels, pastes, creams, or ointments), aerosols (e.g., nasal sprays), liposomes, suppositories, pessaries, injectable and infusible solution and sustained release forms. See, e.g., Gilman, et al. (eds. 1990) Goodman and Gilman's: The Pharmacological Bases of Therapeutics, 8th Ed., Pergamon Press; and Remington's Pharmaceutical Sciences, 17th ed. (1990), Mack Publishing Co., Easton, Pa.; Avis, et al. (eds. 1993) Pharmaceutical Dosage Forms: Parenteral Medications Dekker, NY; Lieberman, et al. (eds. 1990) Pharmaceutical Dosage Forms: Tablets Dekker, NY; and Lieberman, et al. (eds. 1990) Pharmaceutical Dosage Forms: Disperse Systems Dekker, NY. When administered systematically, the therapeutic composition is sterile, pyrogen-free, generally free of particulate matter, and in a parenterally acceptable solution having due regard for pH, isotonicity, and stability. These conditions are known to those skilled in the art. Methods for preparing parenterally administrable compositions are well known or will be apparent to those skilled in the art and are described in more detail in, e.g., “Remington: The Science and Practice of Pharmacy (Formerly Remington's Pharmaceutical Sciences)”, 19th ed., Mack Publishing Company, Easton, Pa. (1995).

[0780] Pharmaceutical compositions provided herein can be in various forms, e.g., in solid, semi-solid, liquid, powder, aqueous, or lyophilized form. Examples of suitable pharmaceutical carriers are known in the art and include but are not limited to water, buffering agents, saline solutions, phosphate buffered saline solutions, various types of wetting agents, sterile solutions, alcohols, gum arabic, vegetable oils, benzyl alcohols, gelatin, glycerin, carbohydrates such as lactose, sucrose, amylose or starch, magnesium stearate, talc, silicic acid, viscous paraffin, perfume oil, fatty acid monoglycerides and diglycerides, pentaerythritol fatty acid esters, hydroxy methylcellulose, powders, among others. Pharmaceutical compositions provided herein can contain other additives including, for example, antioxidants, preservatives, antimicrobial agents, analgesic agents, binders, disintegrants, coloring, diluents, excipients, extenders, glidants, solubilizers, stabilizers, tonicity agents, vehicles, viscosity agents, flavoring agents, emulsions, such as oil/water emulsions, emulsifying and suspending agents, such as acacia, agar, alginic acid, sodium alginate, bentonite, carbomer, carrageenan, carboxymethylcellulose, cellulose, cholesterol, gelatin, hydroxyethyl cellulose, hydroxypropyl cellulose, hydroxypropyl methylcellulose, methylcellulose, octoxynol 9, oleyl alcohol, povidone, propylene glycol monostearate, sodium lauryl sulfate, sorbitan esters, stearyl alcohol, tragacanth, xanthan gum, and derivatives thereof, solvents, and miscellaneous ingredients such as crystalline cellulose, microcrystalline cellulose, citric acid, dextrin, dextrose, liquid glucose, lactic acid, lactose, magnesium chloride, potassium metaphosphate, starch, among others (see, generally, Alfonso R. Gennaro (2000) Remington: The Science and Practice of Pharmacy, 20th Edition. Baltimore, Md.: Lippincott Williams & Wilkins). Such carriers and/or additives can be formulated by conventional methods and can be administered to the subject at a suitable dose. Stabilizing agents such as lipids, nuclease inhibitors, polymers, and chelating agents can preserve the compositions from degradation within the body.

[0781] The route of antibody administration is in accord with known methods, e.g., injection or infusion by intravenous, intraperitoneal, intracerebral, intramuscular, subcutaneous, intraocular, intraarterial, intrathecal, inhalation or intralesional routes, topical or by sustained release systems as noted below. The antibody is typically administered continuously by infusion or by bolus injection. One can administer the antibodies in a local or systemic manner.

[0782] The anti-EGFR antibodies, such as modified antibodies, provided herein can be prepared in a mixture with a pharmaceutically acceptable carrier. Techniques for formulation and administration of the compounds are known to one of skill in the art (see e.g. “Remington's Pharmaceutical Sciences,” Mack Publishing Co., Easton, Pa.). This therapeutic composition can be administered intravenously or through the nose or lung, preferably as a liquid or powder aerosol (lyophilized). The composition also can be administered parenterally or subcutaneously as desired. When administered systematically, the therapeutic composition should be sterile, pyrogen-free and in a parenterally acceptable solution having due regard for pH, isotonicity, and stability. These conditions are known to those skilled in the art.

[0783] Pharmaceutical compositions suitable for use include compositions wherein one or more anti-EGFR antibodies are contained in an amount effective to achieve their intended purpose. Determination of a therapeutically effective amount is well within the capability of those skilled in the art. Therapeutically effective dosages can be determined by using in vitro and in vivo methods as described herein. Accordingly, an anti-EGFR antibody provided herein, when in a pharmaceutical preparation, can be present in unit dose forms for administration.

[0784] Therapeutic formulations can be administered in many conventional dosage formulations. Briefly, dosage formulations of the antibodies provided herein are prepared for storage or administration by mixing the compound having the desired degree of purity with physiologically acceptable carriers, excipients, or stabilizers. Such materials are non-toxic to the recipients at the dosages and concentrations employed, and can include buffers such as TRIS HCl, phosphate, citrate, acetate and other organic acid salts; antioxidants such as ascorbic acid; low molecular weight (less than about ten residues) peptides such as polyarginine, proteins, such as serum albumin, gelatin, or immunoglobulins; hydrophilic polymers such as polyvinylpyrrolidinone; amino acids such as glycine, glutamic acid, aspartic acid, or arginine; monosaccharides, disaccharides, and other carbohydrates including cellulose or its derivatives, glucose, mannose, or dextrins; chelating agents such as EDTA; sugar alcohols such as mannitol or sorbitol; counterions such as sodium and/or nonionic surfactants such as TWEEN, PLURONICS or polyethyleneglycol.

[0785] When used for in vivo administration, the modified anti-EGFR antibody formulation should be sterile and can be formulated according to conventional pharmaceutical practice. This is readily accomplished by filtration through sterile filtration membranes, prior to or following lyophilization and reconstitution. The antibody ordinarily will be stored in lyophilized form or in solution. Other vehicles such as naturally occurring vegetable oil like sesame, peanut, or cottonseed oil or a synthetic fatty vehicle like ethyl oleate or the like may be desired. Buffers, preservatives, antioxidants and the like can be incorporated according to accepted pharmaceutical practice.

[0786] The anti-EGFR antibodies, such as modified anti-EGFR antibodies, can be provided at a concentration of at or about 0.1 to 10 mg/mL, such as, for example at or about 0.1, 0.2, 0.3, 0.4, 0.5, 0.6, 0.7, 0.8, 0.9, 1.0, 1.5, 2.0, 2.5, 3.0, 3.5, 4.0, 4.5, 5.0, 5.5, 6.0, 6.5, 7.0, 7.5, 8.0, 8.5, 9.0, 9.5, 10 mg/mL or more. The volume of the solution can be at or about 1 to 100 mL, such as, for example, at or about 0.5, 1, 2, 3, 4, 5, 10, 15, 20, 25, 30, 35, 40, 45, 50, 55, 60, 65, 70, 75, 80, 85, 90, 95, 100 mL or more. In some examples, the anti-EGFR antibodies are supplied in phosphate buffered saline. For example, the anti-EGFR antibodies can be supplied as a 50-mL, single-use vial containing 100 mg of anti-EGFR antibody at a concentration of 2 mg/mL in phosphate buffered saline.

[0787] An anti-EGFR antibody provided herein can be lyophilized for storage and reconstituted in a suitable carrier prior to use. This technique has been shown to be effective with conventional immunoglobulins and protein preparations and art-known lyophilization and reconstitution techniques can be employed.

[0788] An anti-EGFR antibody provided herein can be provided as a controlled release or sustained release composition. Polymeric materials are known in the art for the formulation of pills and capsules which can achieve controlled or sustained release of the antibodies provided herein (see, e.g., Medical Applications of Controlled Release, Langer and Wise (eds.), CRC Pres., Boca Raton, Fla. (1974); Controlled Drug Bioavailability, Drug Product Design and Performance, Smolen and Ball (eds.), Wiley, New York (1984); Ranger and Peppas (1983) J., Macromol. Sci. Rev. Macromol. Chem. 23:61; see also Levy et al. (1985) Science 228:190; During et al. (1989) Ann. Neurol. 25:351; Howard et al. (1989) J. Neurosurg. 7 1:105; U.S. Pat. Nos. 5,679,377, 5,916,597, 5,912,015, 5,989,463, 5,128,326; and PCT Publication Nos. WO 99/15154 and WO 99/20253). Examples of polymers used in sustained release formulations include, but are not limited to, poly(2-hydroxy ethyl methacrylate), poly(methyl methacrylate), poly(acrylic acid), poly(ethylene-co-vinyl acetate), poly(methacrylic acid), polyglycolides (PLG), polyanhydrides, poly(N-vinyl pyrrolidone), poly(vinyl alcohol), polyacrylamide, poly(ethylene glycol), polylactides (PLA), poly(lactide-co-glycolides) (PLGA), and polyorthoesters. Generally, the polymer used in a sustained release formulation is inert, free of leachable impurities, stable on storage, sterile, and biodegradable. Any technique known in the art for the production of sustained release formulation can be used to produce a sustained release formulation containing one more anti-EGFR antibodies provided herein.

[0789] In some examples, the pharmaceutical composition contains an anti-EGFR antibody provided herein and one or more additional antibodies. In some examples, the one or more additional antibodies includes, but is not limited to, anti-EGFR antibodies described herein or known in the art, such as, for example, ABX-EGF or cetuximab.

[0790] 2. Articles of Manufacture/Kits

[0791] Pharmaceutical compositions of anti-EGFR antibodies or nucleic acids encoding anti-EGFR antibodies, or a derivative or a biologically active portion thereof can be packaged as articles of manufacture containing packaging material, a pharmaceutical composition which is effective for treating a disease or conditions that can be treated by administration of an anti-EGFR antibody, such as the diseases and conditions described herein or known in the art, and a label that indicates that the antibody or nucleic acid molecule is to be used for treating the infection, disease or disorder. The pharmaceutical compositions can be packaged in unit dosage forms containing an amount of the pharmaceutical composition for a single dose or multiple doses. The packaged compositions can contain a lyophilized powder of the pharmaceutical compositions containing the modified anti-EGFR antibodies provided, which can be reconstituted (e.g. with water or, saline) prior to administration.

[0792] The articles of manufacture provided herein contain packaging materials. Packaging materials for use in packaging pharmaceutical products are well known to those of skill in the art. See, for example, U.S. Pat. Nos. 5,323,907, 5,052,558 and 5,033,252, each of which is incorporated herein in its entirety. Examples of pharmaceutical packaging materials include, but are not limited to, blister packs, bottles, tubes, inhalers, inhalers (e.g., pressurized metered dose inhalers (MDI), dry powder inhalers (DPI), nebulizers (e.g., jet or ultrasonic nebulizers) and other single breath liquid systems), pumps, bags, vials, containers, syringes, bottles, and any packaging material suitable for a selected formulation and intended mode of administration and treatment.

[0793] The anti-EGFR antibodies, such as modified anti-EGFR antibodies, nucleic acid molecules encoding the antibodies thereof, pharmaceutical compositions or combinations provided herein also can be provided as kits. Kits can optionally include one or more components such as instructions for use, devices and additional reagents (e.g., sterilized water or saline solutions for dilution of the compositions and/or reconstitution of lyophilized protein), and components, such as tubes, containers and syringes for practice of the methods. Exemplary kits can include the anti-EGFR antibodies provided herein, and can optionally include instructions for use, a device for administering the anti-EGFR antibodies to a subject, a device for detecting the anti-EGFR antibodies in a subject, a device for detecting the anti-EGFR antibodies in samples obtained from a subject, and a device for administering an additional therapeutic agent to a subject.

[0794] The kit can, optionally, include instructions. Instructions typically include a tangible expression describing the modified anti-EGFR antibodies and, optionally, other components included in the kit, and methods for administration, including methods for determining the proper state of the subject, the proper dosage amount, dosing regimens, and the proper administration method for administering the anti-EGFR antibodies. Instructions also can include guidance for monitoring the subject over the duration of the treatment time.

[0795] Kits also can include a pharmaceutical composition described herein and an item for diagnosis. For example, such kits can include an item for measuring the concentration, amount or activity of the selected anti-EGFR antibody in a subject.

[0796] In some examples, the anti-EGFR antibody is provided in a diagnostic kit for the detection of EGFR in an isolated biological sample (e.g., tumor cells, such as circulating tumor cells obtained from a subject or tumor cells excised from a subject). In some examples, the diagnostic kit contains a panel of one or more anti-EGFR antibodies and/or one or more control antibodies (i.e. non-EGFR binding antibodies or EGFR antibodies known in the art, such as cetuximab), where one or more antibodies in the panel is a modified anti-EGFR antibody provided herein.

[0797] Kits provided herein also can include a device for administering the anti-EGFR antibodies to a subject. Any of a variety of devices known in the art for administering medications to a subject can be included in the kits provided herein. Exemplary devices include, but are not limited to, a hypodermic needle, an intravenous needle, and a catheter. Typically the device for administering the modified anti-EGFR antibodies of the kit will be compatible with the desired method of administration of the modified anti-EGFR antibodies.

[0798] 3. Combinations

[0799] Provided are combinations of the anti-EGFR antibodies, such as modified anti-EGFR antibodies, provided herein and a second agent, such as a second anti-EGFR antibody or other therapeutic or diagnostic agent. A combination can include any anti-EGFR antibody or reagent for effecting therapy thereof in accord with the methods provided herein. For example, a combination can include any anti-EGFR antibody and a chemotherapeutic agent. Combinations also can include an anti-EGFR antibody provided herein with one or more additional therapeutic antibodies. For example, the additional therapeutic agent is an anti-cancer agent, such as a chemotherapeutic agent, for example, as described in Section G. Combinations of the modified anti-EGFR antibodies thereof provided also can contain pharmaceutical compositions containing the anti-EGFR antibodies or host cells containing nucleic acids encoding the anti-EGFR antibodies as described herein. The combinations provided herein can be formulated as a single composition or in separate compositions.

### G. THERAPEUTIC USES

[0800] The anti-EGFR antibodies, or fragments thereof, provided herein can be used for any purpose known to the skilled artisan for use of an anti-EGFR antibody. For example, the anti-EGFR antibodies described herein can be used for one or more of therapeutic, diagnostic, industrial and/or research purpose(s). In particular, the methods provided herein include methods for the therapeutic uses of the anti-EGFR antibodies, such as modified anti-EGFR antibodies, provided herein. In some examples, the anti-EGFR antibodies described herein can be used to kill target cells that include EGFR, such as, for example cancer cells. In some examples, the anti-EGFR antibodies can block, antagonize, or agonize EGFR. By virtue of such activity, the anti-EGFR antibodies provided herein, or fragments thereof, can be administered to a patient or subject for treatment of any condition responsive to treatment with an anti-EGFR antibody, including, but not limited to, a tumor, cancer or metastasis. The therapeutic uses include administration of a therapeutically effective amount of a anti-EGFR antibody, alone or in combination with other treatments or agents.

[0801] The anti-EGFR antibodies, such as modified anti-EGFR antibodies, and fragments thereof, provided herein can be used as therapeutics for the treatment of any disease or condition in which existing anti-EGFR antibodies are used, such as Cetuximab. The anti-EGFR antibodies, when administered, result in subjects exhibiting reduced or lessened side effects compared to side effects that can be observed after administration of other anti-EGFR antibodies. As discussed elsewhere herein, existing anti-EGFR antibodies, such as Cetuximab, when administered, can result in subjects exhibiting local and systemic side effects, and in particular dermal side effects. These side effects limit the therapeutic use. In many cases, these side effects are associated with binding to EGFR at a neutral physiologic pH environment, such as in the skin dermis. The methods provided herein include administering a anti-EGFR provided herein, which is more active at low pH, such as a pH ranging from about 5.6 to about 6.8, such as less than or about or pH 5.6, 5.7, 5.8, 5.9, 6.0, 6.1, 6.2, 6.3, 6.4, 6.5, 6.6, 6.7, or 6.8, than at a neutral pH, such as a pH ranging from about 6.8 to about 7.6, such as less than or about or pH 6.8, 6.9, 7.0, 7.1, 7.2, 7.3, 7.4, 7.5 or 7.6. Optionally, the conditions at low pH can include increased lactic acid concentrations, such as from about 10 mM to about 30 mM, such as 10 mM, 11 mM, 12 mM, 13 mM, 14 mM, 15 mM, 16 mM, 17 mM, 18 mM, 19 mM, 20 mM, 25 mM, 30 mM or more. For example, the anti-EGFR antibodies provided herein can have greater activity in a tumor environment (which can have a low pH and/or increased lactic acid concentrations) than in a neutral physiologic environment that is associated with one or more side effects of an anti-EGFR antibody, such as the skin basal layer. This can be advantageous by targeting therapy only to diseased tissues, such as tumor tissues, in order to reduce or prevent side effects, including local and systemic side effects.

[0802] Anti-EGFR antibodies that are associated with reduced side effects, such as the modified anti-EGFR antibodies provided herein, can be used at higher dosing regimens, and can have improved efficacy and safety. Side effects that can be reduced compared to those observed by existing anti-EGFR antibody therapeutics, such as Cetuximab, include any undesirable nontherapeutic effect described herein or known in the art, such as nausea, emesis, chest tightness, headache, and related cardiovascular effects such as blood pressure instability and arterial constriction, dermal toxicity, bone marrow suppression, cardiotoxicity, hair loss, renal dysfunctions, stomatitis, anemia, seizures, immune reactions such as acute anaphylaxis, serum sickness, generation of antibodies, infections, cancer, autoimmune disease and cardiotoxicity.

[0803] In some examples, compared to side effects caused by administration of existing anti-EGFR antibody therapeutics, such as Cetuximab, administration of a anti-EGFR antibody provided herein decreases the severity of one or more side effects by at least or about 99%, at least or about 95%, at least or about 90%, at least or about 85%, at least or about 80%, at least or about 75%, at least or about 70%, at least or about 65%, at least or about 60%, at least or about 55%, at least or about 50%, at least or about 45%, at least or about 40%, at least or about 35%, at least or about 30%, at least or about 25%, at least or about 20%, at least or about 15%, or at least or about 10% relative to the severity of the one or more side effects of an unmodified EGFR antibody.

[0804] The methods can include selection of a patient or subject for treatment, e.g. prior to treatment of the subject, for example to determine whether the patient or subject has an EGFR dependent disease or condition. In some examples, the methods provided herein include a step of identifying a patient or subject that has experienced or is experiencing an adverse side effect resulting from administration of an anti-EGFR antibody, such as Cetuximab. One skilled in the art would easily be able to diagnose such conditions, disorders and side effects using tests and assays known to one of skill in the art and/or described herein.

[0805] Treatment of diseases and conditions with anti-EGFR antibodies, such as modified anti-EGFR antibodies, can be effected by any suitable route of administration using suitable formulations as described herein including, but not limited to, infusion, subcutaneous injection, intramuscular, intradermal, oral, and topical and transdermal administration.

[0806] It is understood that while the anti-EGFR antibodies, such as modified anti-EGFR antibodies, and antibody fragments, provided herein, when administered, can result in subjects exhibiting lessened or reduced side effects compared to other anti-EGFR antibodies, such as Cetuximab, that some side effects can occur upon administration. It is understood that number and degree of tolerable side effects depends upon the condition for which the compounds are administered. For example, certain toxic and undesirable side effects are tolerated when treating life-threatening illnesses that would not be tolerated when treating disorders of lesser consequence. Amounts effective for therapeutic use can depend on the severity of the disease and the weight and general state of the subject as well as the route of administration. Local administration of the therapeutic agent will typically require a smaller dosage than any mode of systemic administration, although the local concentration of the therapeutic agent can, in some cases, be higher following local administration than can be achieved with safety upon systemic administration.

[0807] This section provides exemplary uses of, and administration methods for, the anti-EGFR antibodies, such as modified anti-EGFR antibodies, provided herein. These described uses are exemplary and do not limit the applications of the methods described herein. Such methods include, but are not limited to, methods of treatment of any condition or disease that can be treated by administration of an anti-EGFR antibody. It is within the skill of a treating physician to identify such diseases or conditions.

[0808] 1. Exemplary Diseases and Conditions

[0809] The anti-EGFR antibodies, such as modified anti-EGFR antibodies, described herein can be used for any therapeutic purpose that antibodies, such as anti-EGFR antibodies can be used for (see, e.g., Reeves et al. (2011) Otolaryngol Head Neck Surg. 144(5):676-84; Adams et al. (2008) Expert Rev Anticancer Ther. 8(8):1237-45; Belda-Iniesta et al. (2006) Cancer Biol Ther. 5(8):912-4; Liu et al. (2010) Cancer Chemother Pharmacol. 65(5):849-61). In some examples, the anti-EGFR antibodies are administered to a patient to treat a disease or disorder that can be treated with an anti-EGFR antibody. In some examples, treatment of the disease includes administration of an anti-EGFR antibody described herein after clinical manifestation of the disease to combat the symptoms of the disease. In some examples, administration of an anti-EGFR antibody described herein is administered to eradicate the disease. Examples of diseases or disorders that can be treated with the modified anti-EGFR antibodies described herein include cancer, autoimmune and inflammatory diseases, infectious diseases, and cancer.

[0810] a. Cancer

[0811] EGFR is associated with cancer development and progression in a variety of human malignancies, such as lung cancer, head and neck cancer, colon cancer, breast cancer, ovarian cancer and glioma. EGFR-related molecular factors, such as copy number and gene mutations, have been identified as prognostic and predictive factors for cancer (see, e.g., Bronte et al. (2011) Front Biosci. 3:879-887; Harding and Burtness (2005) Drugs Today 41(2):107-127). For example, high EGFR expression is associated with poor prognosis in patients with head and neck squamous cell carcinoma (HNSCC) (Szabo et al. (2011) Oral Oncol. 47(6):487-496).

[0812] Anti-EGFR antibodies, such as the modified anti-EGFR antibodies described herein, can bind to and prevent stimulation of the EGF receptor. For example, binding of a modified anti-EGFR antibody to the receptor can inhibit the binding of epidermal growth factor (EGF) and/or result in internalization of the antibody-receptor complex. (Harding and Burtness, Drugs Today (Barc). Thus, anti-EGFR antibodies, such as the modified anti-EGFR antibodies provided herein, can, for example, prevent receptor phosphorylation and activation of the receptor-associated kinase activity, ultimately shutting off receptor-mediated cell signaling.

[0813] Due to the increased activity of anti-EGFR antibodies provided herein at low pH and/or elevated lactate concentrations, the anti-EGFR antibodies can be preferentially active at tumor microenvironments compared to non-target cells or tissues. Modified anti-EGFR antibodies, and fragments thereof, described herein, can be used to treat tumors, including solid tumors, that express EGFR. EGFR expressing tumors can be sensitive to EGF present in their local microenvironment, and can further be stimulated by tumor produced EGF or Transforming Growth Factor-alpha (TGF-α). The diseases and conditions that can be treated or prevented by the present methods include, for example, those in which tumor growth is stimulated through an EGFR paracrine and/or autocrine loop. The methods described herein can therefore be useful for treating a tumor that is not vascularized, or is not yet substantially vascularized. In addition, anti-EGFR antibodies, such as the modified anti-EGFR antibodies described herein, can inhibit tumor associated angiogenesis. EGFR stimulation of vascular endothelium is associated with vascularization of tumors. Typically, vascular endothelium is stimulated in a paracrine fashion by EGF and/or TGF-α from other sources (e.g. tumor cells). Accordingly, anti-EGFR antibodies, such as the modified anti-EGFR antibodies described herein can be useful for treating subjects with vascularized tumors or neoplasms.

[0814] An altered pH microenvironment is the most common microenvironment found in disease states such as tumor microenvironments, and it is the most uniform within the disease microenvironment compared to other properties such as hypoxia (see e.g. Fogh Andersen et al. (1995) Clin. Chem., 41:1522-1525; Bhujwalla et al. (2002) NMR Biomed., 15:114-119; Helmlinger et al. (1997) Nature Med., 3:177; Gerweck and Seetharaman (1996), Cancer Res. 56(6):1194-1198). For example, in many tumors the ‘Warburg effect’ creates a microenvironment with a pH ranging from about 5.6 to about 6.8, such as less than or about or pH 5.6, 5.7, 5.8, 5.9, 6.0, 6.1, 6.2, 6.3, 6.4, 6.5, 6.6, 6.7, or 6.8. Thus, anti-EGFR antibodies that are more active at acidic pH than at neutral pH, such as the modified anti-EGFR antibodies described herein, can be used to treat EGFR expressing tumors, while minimizing activity in non-target disease cells or tissues.

[0815] In addition, in many tumors, the ‘Warburg effect’ creates a microenvironment with lactate concentrations between 10 to 15 mM. Elevated lactate levels have been found associated with a variety of tumors including, but not limited to, head and neck, metastatic colorectal cancer, cervical cancer and squamous cell carcinoma (see e.g., Correlation of High Lactate Levels in Head and Neck Tumors with Incidence of Metastasis. Stefan Walenta, Ahmad Salameh, Heidi Lyng, Jan F. Evensen, Margarethe Mitze, Einar K. Rofstad, and Wolfgang Mueller-Klieser. (1997) American Journal of Pathology 150(2): 409-415; Correlation of High Lactate Levels in Human Cervical Cancer with Incidence of Metastasis. Georg Schwickert, Stefan Walenta, Kolbein Suiulfor. Einar K. Rofstad, and Wolfgang Mueller-Klieser. (1995) Cancer Research 55: 4757-4759; High Lactate Levels Predict Likelihood of Metastases, Tumor Recurrence, and Restricted Patient Survival in Human Cervical Cancers. Stefan Walenta, Michael Wetterling, Michael Lehrke, Georg Schwickert, Kolbein Sundfør, Einar K. Rofstad, and Wolfgang Mueller-Klieser. (2000) Cancer Research 60: 916-921; In Vitro Proton Magnetic Resonance Spectroscopic Lactate and Choline Measurements, 18F-FDG Uptake, and Prognosis in Patients with Lung Adenocarcinoma. JianFei Guo, Kotaro Higashi, Hajime Yokota, Yosinobu Nagao, Yoshimichi Ueda, Yuko Kodama, Manabu Oguchi, Suzuka Taki, Hisao Tonami, and Itaru Yamamoto. (2004) J Nucl Med 45: 1334-1339; Lactate and malignant tumors: A therapeutic target at the end stage of glycolysis. Saroj P. Mathupala, Chaim B. Colen, Prahlad Parajuli, Andrew E. Sloan (2007) J Bioenerg Biomembr 39: 73-77; Lactate Metabolism in Patients with Metastatic Colorectal Cancer. Christopher P. Holroyde, Rita S. Axelrod, Charles L. Skutches, Agnes C. Haff, Pavle Paul, and George A. Reichard. (1979) Cancer Research 39: 4900-4904; Lactate, not pyruvate, is neuronal aerobic glycolysis end product: an in vitro electrophysiological study. A Schurr and R. S. Payne. (2007) Neuroscience 147: 613-619; Tumor lactate content predicts for response to fractionated irradiation of human squamous cell carcinomas in nude mice. Verena Quenneta, Ala Yarominab, Daniel Zipsb, Andrea Rosnerb, Stefan Walentaa, Michael Baumannb, Wolfgang Mueller-Kliesera. (2006) Radiotherapy and Oncology 81: 130-135). Thus, anti-EGFR antibodies that are more active at increased lactate concentrations than at normal physiologic lactate concentrations, such as the modified anti-EGFR antibodies described herein, can be used to treat EGFR expressing tumors, while minimizing activity at non-target disease cells or tissues.

[0816] Tumors that can be treated include primary tumors and metastatic tumors, as well as refractory tumors. Refractory tumors include tumors that fail to respond or are resistant to treatment with chemotherapeutic agents alone, antibodies alone, radiation alone or combinations thereof. Refractory tumors also encompass tumors that appear to be inhibited by treatment with such agents, but recur up to five years, sometimes up to ten years or longer after treatment is discontinued. The tumors can express EGFR at normal levels or they can overexpress EGFR at levels, for example, that are at least 10, 100, or 1000 times normal levels.

[0817] Examples of tumors that express EGFR and can be treated by the modified anti-EGFR antibodies, and fragments thereof, provided herein include carcinomas, gliomas, sarcomas (including liposarcoma), adenocarcinomas, adenosarcomas, and adenomas. Such tumors can occur in virtually all parts of the body, including, for example, breast, heart, lung, small intestine, colon, spleen, kidney, bladder, head and neck, ovary, prostate, brain, pancreas, skin, bone, bone marrow, blood, thymus, uterus, testicles, cervix or liver.

[0818] Exemplary of tumors that can be treated by anti-EGFR antibodies, such as the modified anti-EGFR antibodies, and fragments thereof, provided herein, are those that overexpress EGFR. Some tumors observed to overexpress EGFR that can be treated include, but are not limited to, colorectal and head and neck tumors, especially squamous cell carcinoma of the head and neck, brain tumors such as glioblastomas, and tumors of the lung, breast, pancreas, esophagus, bladder, kidney, ovary, cervix, and prostate.

[0819] Other examples of tumors that can be treated by the anti-EGFR antibodies, and antibody fragments thereof, provided herein include Kaposi's sarcoma, CNS neoplasms, neuroblastomas, capillary hemangioblastomas, meningiomas and cerebral metastases, melanoma, gastrointestinal and renal carcinomas and sarcomas, rhabdomyosarcoma, glioblastoma (such as glioblastoma multiforme) and leiomyosarcoma. Examples of cancer that can express EGFR include but are not limited to lymphoma, blastoma, neuroendocrine tumors, mesothelioma, schwanoma, meningioma, melanoma, and leukemia or lymphoid malignancies. Examples of such cancers include hematologic malignancies, such as Hodgkin's lymphoma; non-Hodgkin's lymphomas (Burkitt's lymphoma, small lymphocytic lymphoma/chronic lymphocytic leukemia, mycosis fungoides, mantle cell lymphoma, follicular lymphoma, diffuse large B-cell lymphoma, marginal zone lymphoma, hairy cell leukemia and lymphoplasmacytic leukemia), tumors of lymphocyte precursor cells, including B-cell acute lymphoblastic leukemia/lymphoma, and T-cell acute lymphoblastic leukemia/lymphoma, thymoma, tumors of the mature T and NK cells, including peripheral T-cell leukemias, adult T-cell leukemia/T-cell lymphomas and large granular lymphocytic leukemia, Langerhans cell histocytosis, myeloid neoplasias such as acute myelogenous leukemias, including AML with maturation, AML without differentiation, acute promyelocytic leukemia, acute myelomonocytic leukemia, and acute monocytic leukemias, myelodysplastic syndromes, and chronic myeloproliferative disorders, including chronic myelogenous leukemia; tumors of the central nervous system such as glioma, glioblastoma, neuroblastoma, astrocytoma, medulloblastoma, ependymoma, and retinoblastoma; solid tumors of the head and neck (e.g., nasopharyngeal cancer, salivary gland carcinoma, and esophageal cancer), lung (e.g., small-cell lung cancer, non-small cell lung cancer, adenocarcinoma of the lung and squamous carcinoma of the lung), digestive system (e.g., gastric or stomach cancer including gastrointestinal cancer, cancer of the bile duct or biliary tract, colon cancer, rectal cancer, colorectal cancer, and anal carcinoma), reproductive system (e.g., testicular, penile, or prostate cancer, uterine, vaginal, vulval, cervical, ovarian, and endometrial cancer), skin (e.g., melanoma, basal cell carcinoma, squamous cell cancer, actinic keratosis), liver (e.g., liver cancer, hepatic carcinoma, hepatocellular cancer, and hepatoma), bone (e.g., osteoclastoma, and osteolytic bone cancers) additional tissues and organs (e.g., pancreatic cancer, bladder cancer, kidney or renal cancer, thyroid cancer, breast cancer, cancer of the peritoneum, and Kaposi's sarcoma), and tumors of the vascular system (e.g., angiosarcoma and hemagiopericytoma).

[0820] b. Non-Cancer Hyperproliferative Diseases

[0821] Anti-EGFR antibodies, such as modified anti-EGFR antibodies, and antibody fragments thereof, provided herein can be used to treat a non-cancer hyperproliferative disease in a subject. EGFR is a critical pathway element in signalling from G-protein-coupled receptors (GPCRs), cytokines, receptor tyrosine kinases and integrins to a variety of cellular responses such as mitogen activated protein kinase activation, gene transcription and proliferation. Ligand binding to EGFR can induce autophosphorylation of cytoplasmic tyrosine residues, which can initiate cellular pathways leading to cellular proliferation. Overexpression and/or overstimulation can result in hyperproliferation. For example, the EGFR vIII mutation causes the EGFR receptor to have a constitutively active kinase function and stimulate cellular proliferation. It is known in the art that anti-EGFR antibodies can treat non-cancer hyperproliferative disorders. For example, Ménétrier's disease, a rare premalignant, non-cancerous, hyperproliferative disorder of the stomach, can be treated with cetuximab (Fiske et al. (2009) Sci Trasl. Med. 1(8): 8ra18; Myers et al. (2012) Mol. Cell. Proteomics 11:10.1074/mcp.M111.015222, 1-15).

[0822] Examples of hyperproliferative diseases that can be treated by the anti-EGFR antibodies provided herein include any hyperproliferative diseases that can be treated by administration of an anti-EGFR antibody and include, for example, psoriasis, actinic keratoses, and seborrheic keratoses, warts, keloid scars, and eczema. Also included are hyperproliferative diseases caused by virus infections, such as papilloma virus infection. Different types of psoriasis can display characteristics such as pus-like blisters (pustular psoriasis), severe sloughing of the skin I (erythrodermic psoriasis), drop-like dots (guttae psoriasis) and smooth inflamed lesions (inverse psoriasis). It is understood that treatment of psoriasis includes treatment of all types of psoriasis (e.g., psoriasis vulgaris, psoriasis pustulosa, psoriasis erythrodermica, psoriasis arthropathica, parapsoriasis, palmoplantar pustulosis).

[0823] c. Autoimmune Diseases or Disorders

[0824] Anti-EGFR antibodies, such as modified anti-EGFR antibodies, and antibody fragments thereof, provided herein can be used to treat autoimmune diseases or disorders. Examples of autoimmune diseases or disorders that can be treated with the anti-EGFR antibodies described herein include, but are not limited to, allogenic islet graft rejection, alopecia areata, ankylosing spondylitis, antiphospholipid syndrome, autoimmune Addison's disease, antineutrophil cytoplasmic autoantibodies (AN CA), autoimmune diseases of the adrenal gland, autoimmune hemolytic anemia, autoimmune hepatitis, autoimmune myocarditis, autoimmune neutropenia, autoimmune oophoritis and orchitis, autoimmune thrombocytopenia, autoimmune urticaria, Behcet's disease, bullous pemphigoid, cardiomyopathy, Castleman's syndrome, celiac spruce-dermatitis, chronic fatigue immune dysfunction syndrome, chronic inflammatory demyelinating polyneuropathy, Churg-Strauss syndrome, cicatrical pemphigoid, CREST syndrome, cold agglutinin disease, Crohn's disease, dermatomyositis, discoid lupus, essential mixed cryoglobulinemia, factor VIII deficiency, fibromyalgia-fibromyositis, glomerulonephritis, Grave's disease, Guillain-Barre, Goodpasture's syndrome, graft-versus-host disease (GVHD), Hashimoto's thyroiditis, hemophilia A, idiopathic pulmonary fibrosis, idiopathic thrombocytopenia purpura (ITP), IgA neuropathy, IgM polyneuropathies, immune mediated thrombocytopenia, juvenile arthritis, Kawasaki's disease, lichen plantus, lupus erythematosus, Meniere's disease, mixed connective tissue disease, multiple sclerosis, type 1 diabetes mellitus, myasthenia gravis, pemphigus vulgaris, pernicious anemia, polyarteritis nodosa, polychondritis, polyglandular syndromes, polymyalgia rheumatica, polymyositis and dermatomyositis, primary agammaglobulinemia, primary biliary cirrhosis, psoriasis, psoriatic arthritis, Reynaud's phenomenon, Reiter's syndrome, rheumatoid arthritis, sarcoidosis, scleroderma, Sjögren's syndrome, solid organ transplant rejection, stiff-man syndrome, systemic lupus erythematosus, Takayasu arteritis, temporal arteritis/giant cell arteritis, thrombotic thrombocytopenia purpura, ulcerative colitis, uveitis, vasculitides such as dermatitis herpetiformis vasculitis, vitiligo, and Wegner's granulomatosis.

[0825] d. Inflammatory Disorders

[0826] Anti-EGFR antibodies, such as modified anti-EGFR antibodies, and antibody fragments thereof, provided herein can be used to treat autoimmune diseases or disorders. Inflammatory disorders that can be treated by the modified anti-EGFR antibodies provided herein include but are not limited to acute respiratory distress syndrome (ARDS), acute septic arthritis, allergic encephalomyelitis, allergic rhinitis, allergic vasculitis, allergy, asthma, atherosclerosis, chronic inflammation due to chronic bacterial or viral infections, chronic obstructive pulmonary disease (COPD), coronary artery disease, encephalitis, inflammatory bowel disease, inflammatory osteolysis, inflammation associated with acute and delayed hypersensitivity reactions, inflammation associated with tumors, peripheral nerve injury or demyelinating diseases, inflammation associated with tissue trauma such as burns and ischemia, inflammation due to meningitis, multiple organ injury syndrome, pulmonary fibrosis, sepsis and septic shock, Stevens-Johnson syndrome, undifferentiated arthropy, and undifferentiated spondyloarthropathy.

[0827] e. Infectious Diseases

[0828] Anti-EGFR antibodies, such as modified anti-EGFR antibodies, and antibody fragments thereof, provided herein can be used to treat autoimmune diseases or disorders. Infectious diseases that can be treated by the anti-EGFR antibodies described herein include but are not limited to diseases caused by pathogens such as viruses, bacteria, fungi, protozoa, and parasites. Infectious diseases can be caused by viruses including adenovirus, cytomegalovirus, dengue, Epstein-Barr, hanta, hepatitis A, hepatitis B, hepatitis C, herpes simplex type I, herpes simplex type II, human immunodeficiency virus, (HIV), human papilloma virus (HPV), influenza, measles, mumps, papova virus, polio, respiratory syncytial virus, rinderpest, rhinovirus, rotavirus, rubella, SARS virus, smallpox and viral meningitis. Infections diseases can also be caused by bacteria including Bacillus anthracis, Borrelia burgdorferi, Campylobacter jejuni, Chlamydia trachomatis, Clostridium botulinum, Clostridium tetani, Diphtheria, E. coli, Legionella, Helicobacter pylori, Mycobacterium rickettsia, Mycoplasma Neisseria, Pertussis, Pseudomonas aeruginosa, S. pneumonia, Streptococcus, Staphylococcus, Vibrio cholerae and Yersinia pestis. Infectious diseases can also be caused by fungi such as Aspergillus fumigatus, Blastomyces dermatitidis, Candida albicans, Coccidioides immitis, Cryptococcus neoformans, Histoplasma capsulatum and Penicillium marneffei. Infectious diseases can also be caused by protozoa and parasites such as chlamydia, kokzidios, leishmania, malaria, rickettsia, and trypanosoma

[0829] f. Other Diseases and Conditions

[0830] Anti-EGFR antibodies, such as, odified anti-EGFR antibodies, and antibody fragments thereof, provided herein can be used to treat other diseases and conditions associated with expression of EGFR and/or for which exiting anti-EGFR antibodies, such as Cetuximab, are known to treat. Other diseases and conditions that can be treated by the anti-EGFR antibodies described herein include but are not limited to heart conditions such as congestive heart failure (CHF), myocarditis and other conditions of the myocardium; skin conditions such as rosecea, acne, and eczema; bone and tooth conditions such as bone loss, osteoporosis, Paget's disease, Langerhans' cell histiocytosis, periodontal disease, disuse osteopenia, osteomalacia, monostotic fibrous dysplasia, polyostotic fibrous dysplasia, bone metastasis, bone pain management, humoral malignant hypercalcemia, periodontal reconstruction, spinal cord injury, and bone fractures; metabolic conditions such as Gaucher's disease; endocrine conditions such as Cushing's syndrome; and neurological conditions.

[0831] 2. Subjects for Therapy

[0832] A subject or candidate for therapy with an anti-EGFR antibody, such as a modified anti-EGFR antibody provided herein, includes, but is not limited to, a subject, such as a human patient, that has a disease or condition that can be treated by administration of an anti-EGFR antibody, such as diseases or conditions described herein or known in the art.

[0833] a. Selection of Subjects Overexpressing EGFR

[0834] In some examples, subjects or candidates for therapy are tested for evidence of positive EGFR expression using methods known in the art, such as for example Western blotting (WB) on membranes and total homogenates, and immunohistochemistry (IHC) on tissue microarrays. In addition, phosphorylated EGFR (pEGFR) can be measured by Western blotting on membranes (see, e.g., Thariat et al. (2012) Clin. Cancer Res. 18:1313). EGFR assessment can be evaluated using, for example, the EGFR PHARMDX scoring guidelines (Dako, Glostrup, Denmark). EGFR expression can be evaluated on sections that include the deepest region of tumor invasion, which can contain the greatest density of EGFR-positive cells. Such methods are within the ability of the skilled artisan (see, e.g., Ervin-Haynes et al. (2006) J. Clin. Oncol. ASCO Annual Meeting Proceedings Part I. Vol. 24, No. 18S (June 20 Supplement)13000; Goldstein and Armin (2001) Cancer 92(5):1331-1346; Bibeau et al. (2006) Virchows Arch. 449(3):281-287)

[0835] b. Selection of Subjects Exhibiting EGFR-Associated Polymorphism

[0836] In some examples, subjects or candidates for therapy are screened for one or more polymorphisms in order to predict the efficacy of the anti-EGFR antibodies provided herein. A number of the receptors that can interact with anti-EGFR antibodies, such as the modified EGFR antibodies provided herein, are polymorphic in the human population. For a given patient or population of patients, the efficacy of the modified anti-EGFR antibodies provided herein can be affected by the presence or absence of specific polymorphisms in proteins. For example, FcγRIIIa is polymorphic at position 158, which is commonly either V (high affinity) or F (low affinity). Patients with the V/V homozygous genotype mount a stronger natural killer (NK) response and are observed to have a better clinical response to treatment with the anti-CD20 antibody Rituxan® (rituximab), (Dall'Ozzo et. al. (2004) Cancer Res. 64:4664-4669). Additional polymorphisms include but are not limited to FcγRIIa R131 or H 131, and such polymorphisms are known to either increase or decrease Fc binding and subsequent biological activity, depending on the polymorphism.

[0837] In some examples, subjects or candidates for therapy are screened for one or more polymorphisms in order to predict the efficacy of the anti-EGFR antibodies provided herein. Such methods are within the ability of the skilled artisan. This information can be used, for example, to select patients to include or exclude from clinical trials or, post-approval, to provide guidance to physicians and patients regarding appropriate dosages and treatment options. For example, in patients that are homozygous or heterozygous for FcγRIIIa 158F antibody drugs, such as the anti-CD20 mAb Rituximab, can have decreased efficacy (Carton 2002 Blood 99: 754-758; Weng 2003 J. Clin. Oncol. 21:3940-3947); such patients can show a much better clinical response to the modified anti-EGFR antibodies provided herein.

[0838] c. Identifying Subjects Exhibiting Anti-EGFR-Associated Side Effects

[0839] In some examples, a subject or candidate for therapy with an anti-EGFR antibody provided herein, such as a modified anti-EGFR antibody provided herein, includes, but is not limited to, a subject, such as a human patient, that has experienced one more side effects resulting from administration of an anti-EGFR antibody, such as any anti-EGFR antibody known in the art. Administration of a anti-EGFR provided herein to the subject in place of the anti-EGFR antibody therapy that caused the side effect(s) can result in comparable or improved therapeutic efficacy, while resulting in reduced or lessened side effect(s). Thus, in such methods, a subject that has been administered an anti-EGFR antibody therapeutic other than the anti-EGFR antibodies provided herein, and that exhibits one or more symptoms or side effects associated with administration of the therapeutic, is identified. The identified patient is then administered an anti-EGFR antibody provided herein and therapy is continued. The dosage regime, including dosage amount and frequency of administration, of the anti-EGFR provided herein can be the same or different than the previous anti-EGFR antibody therapy. In some cases, the dosage amount can be increased or decreased. It is within the skill of the practicing physician to determine the dosage regime based on factors such as the particular subject being treated, the nature of the disease or condition, the nature of the existing symptoms or side effects and the particular modified anti-EGFR antibody provided herein that is to be administered.

[0840] As discussed elsewhere herein, EGFR is expressed in many normal human tissues (Lacouture, and Melosky (2007) Skin Therapy Lett. 12, 1-5). Therefore, administration of many therapeutic anti-EGFR antibodies, such as Cetuximab, can result in undesirable reactions. Such side effects are well-known to one of skill in the art and can be assessed or identified. Methods to identify side effects caused by an anti-EGFR antibody therapeutic include any methods described herein, such as patient interview, patient examination and blood tests. Side effects that can be assessed include any side effects that are known to one of skill in the art to be associated with administration of an anti-EGFR antibody, including any side effects described herein, such as, for example, a side effect associated with administration of Cetuximab.

[0841] For example, side effects of Cetuximab include any described herein and/or known to one of skill in the art, including symptomatic hypomagnesemia, paronychia, fever, dermatologic toxicity, papulopustular rash of the face and upper trunk, hair growth abnormalities, loss of scalp hair, increased growth of facial hair and eyelashes, dry and itchy skin, and periungual inflammation with tenderness (Eng (2009) Nat. Rev. 6:207-218; Schrag et al. (2005) J. Natl. Cancer Inst. 97(16):1221-1224; Lacouture and Melosky (2007) Skin Therapy Lett. 12:1-5). In some examples, the side effects of Cetuximab include dermatological toxicities, including papulopustular eruption, dry skin, pruritus, ocular and nail changes, acneiform skin reaction, acneiform rash, acneiform follicular rash, acne-like rash, maculopapular skin rash, monomorphic pustular lesions, papulopustular reaction. (Lacouture and Melosky (2007) Skin Therapy Lett. 12:1-5) The side effects can be triggered by external events and/or can develop over time. For example, skin rashes can be triggered by sun exposure and can develop in stages, such as sensory disturbance, erythema, and edema (for example, week 1); papulopustular eruption (for example, week 2); and crusting (for example, week 4). If the rash is treated successfully, erythema and dry skin can be seen in areas previously affected by the papulopustular eruption (for example, weeks 4-6). Other dermatological toxicities that can be associated with administration of an anti-EGFR antibody, such as Cetuximab include pruritus, erythema and paronychial inflammation. (Lacouture, and Melosky (2007) Skin Therapy Lett. 12, 1-5). For example, Cetuximab elicits an immune response in about 5% of patients. Such an immune response can result in an immune complex-mediated clearance of the antibodies or fragments from the circulation, and make repeated administration unsuitable for therapy, thereby reducing the therapeutic benefit to the patient and limiting the re-administration of the antibody.

[0842] In some examples, the severity of side effects can be evaluated according to the National Cancer Institute Common Terminology Criteria for Adverse Events (CTCAE) v4.0, which sets forth criteria for grading the severity for side effects. The CTCAE includes Grades 1 through 5 that set forth unique clinical descriptions of severity for each adverse effect. Under the general guidelines of the CTCAE, Grade 1 adverse events are mild, asymptomatic or mild symptoms, clinical or diagnostic observations only; and intervention is not indicated. Grade 2 adverse events are moderate, minimal, local or noninvasive intervention indicated, limiting age-appropriate instrumental Activities of Daily Living (ADL). Grade 3 adverse events are severe or medically significant but not immediately life-threatening, with hospitalization or prolongation of hospitalization indicated, disabling and limiting self care ADL. Grade 4 adverse events are life-threatening consequences, and urgent intervention is indicated. Grade 5 adverse events are classified as death related to the adverse event(s). Thus, for example, administering a anti-EGFR antibody provided herein in a subject identified as having a particular grade of side effects can result in a reduction of side effects is characterized by a reduction in the grade of the side effect as classified under the CTCAE v4.0. In some examples, reduction of side effects is characterized by a reduction in the severity of the symptoms associated with the side effect, including any symptoms described herein or known to one of skill in the art.

[0843] Other methods to identify patients that exhibit a side effect of an anti-EGFR antibody are known to one of skill in the art, and include quality-of-life questionnaires (e.g., Jonker et al. (2007) N. Engl. J. Med. 357:2040-2048). Examples of side effects of anti-EGFR antibodies, and methods known to the skilled artisan to identify the severity of side effects, are described below. These side effects are exemplary and not meant to be limiting. It is understood that any side effects known in the art or described herein that are associated with administration of an anti-EGFR antibody, such as Cetuximab, can be identified in a subject, whereby the subject can then be treated with an anti-EGFR antibody, such as a modified anti-EGFR antibody, provided herein so that such side effects are not further exacerbated and/or are reduced.

[0844] i. Skin toxicities

[0845] In human skin, EGFR is expressed in basal keratinocytes and can stimulate epidermal growth, inhibit differentiation, and accelerate wound healing (Lacouture, and Melosky (2007) Skin Therapy Lett. 12:1-5; Nanney et al. (1996) J. Invest. Dermatol 94(6):742-748). Inhibition of EGFR function can impair growth and migration of keratinocytes, and result in inflammatory chemokine expression. These effects can lead to inflammatory cell recruitment and subsequent cutaneous injury, which can result in side effects, such as side effects described herein. The pH of the skin basal layer environment is neutral (e.g., at or about pH 7.0-7.2). Therefore, anti-EGFR antibodies, such as modified anti-EGFR antibodies, that have increased activity at low pH than at neutral pH, such as the anti-EGFR antibodies provided herein, can have decreased skin toxicity and decreased side effects. Examples of side effects resulting from EGFR inhibition in the skin, and methods of identification and classification thereof, are described below.

[0846] Papulopustular rash and acneiform rash, which are characterized by an eruption consisting of papules (a small, raised pimple) and pustules (a small pus filled blister), typically appearing in face, scalp, and upper chest and back. Unlike acne, papulopustular rash does not present with whiteheads or blackheads, and can be symptomatic, with itchy or tender lesions. (CTCAE v. 4.03, U.S. Department of Health and Human Services, published Jun. 14, 2010). Papulopustular rash and acneiform rash can be identified and classified by examination of the patient and/or by clinical interview. Grade 1 papulopustular rash or acneiform rash is classified as papules and/or pustules covering <10% Body Surface Area (BSA), which can be associated with symptoms of pruritus or tenderness. Grade 2 papulopustular rash or acneiform rash is classified as papules and/or pustules covering 10-30% BSA, which can be associated with symptoms of pruritus or tenderness; associated with psychosocial impact; limiting instrumental activities of daily living (ADL). Grade 3 papulopustular rash or acneiform rash is classified as papules and/or pustules covering >30% BSA, which can be associated with symptoms of pruritus or tenderness; limiting self-care ADL; and can be associated with local superinfection with oral antibiotics indicated. Grade 4 papulopustular rash or acneiform rash is classified as papules and/or pustules covering any percent BSA, which can be associated with symptoms of pruritus or tenderness and are associated with extensive superinfection with IV antibiotics indicated; and life-threatening consequences. Grade 5 papulopustular rash or acneiform rash is classified as resulting in death. (CTCAE v. 4.03, U.S. Department of Health and Human Services, published Jun. 14, 2010; Schrag J. Natl. Cancer. Inst. 97(16):1221-1224).

[0847] An example of a side effect of an anti-EGFR antibody, such as Cetuximab, is dry skin, which is a disorder characterized by flaky and dull skin; fine pores, and papery thin skin texture. Dry skin can be identified and classified by examination of the patient and/or by clinical interview. Grade 1 dry skin is classified as covering <10% BSA and no associated erythemia or pruritus. Grade 2 dry skin is classified as covering 10%-30% BSA, associated with erythema or pruritus and limiting instrumental ADL. Grade 3 dry skin is classified as covering >30% BSA, associated with pruritus and limiting self care ADL. (CTCAE v. 4.03, U.S. Department of Health and Human Services, published Jun. 14, 2010; Schrag J. Natl. Cancer. Inst. 97(16):1221-1224)

[0848] Skin hyperpigmentation is a side effect characterized by darkening of the skin due to excessive melanin deposition. Skin hyperpigmentation can be identified and classified by examination of the patient and/or by clinical interview. Grade 1 skin hyperpigmentation is classified as hyperpigmentation covering <10% BSA, no psychosocial impact. Grade 2 skin hyperpigmentation is classified as hyperpigmentation covering >10% BSA, and associated with psychosocial impact. (CTCAE v. 4.03, U.S. Department of Health and Human Services, published Jun. 14, 2010; Schrag J. Natl. Cancer. Inst. 97(16):1221-1224)

[0849] Pruritus is a side effect characterized by an intense itching sensation. Pruritus can be evaluated by patient examination and/or clinical interview. Grade 1 pruritus is classified as mild or localized itching, and topical intervention is indicated. Symptoms of grade 2 pruritus include intense or widespread itching, intermittent itching, skin changes from scratching (e.g., edema, papulation, excoriations, lichenification, oozing/crusts), limiting instrumental ADL, and oral intervention can be indicated. Symptoms of grade 3 pruritus include intense, widespread and/or constant itching, limiting self care ADL or sleep, and oral corticosteroid or immunosuppressive therapy can be indicated. (CTCAE v. 4.03, U.S. Department of Health and Human Services, published Jun. 14, 2010; Schrag J. Natl. Cancer. Inst. 97(16):1221-1224)

[0850] Paronychia is a side effect characterized by an infectious process involving the soft tissues around the nail. Paronychia can be evaluated by patient examination and/or clinical interview. Grade 1 paronychia is classified as including symptoms of nail fold edema or erythema and disruption of the cuticle. Symptoms of grade 2 paronychia can include localized intervention indicated, oral intervention indicated (e.g., antibiotic, antifungal, antiviral), nail fold edema or erythema with pain, discharge or nail plate separation and limiting instrumental ADL. Symptoms of grade 3 paronychia can include limiting self care ADL, with surgical intervention or IV antibiotics indicated.

[0851] ii. Hypomagnesemia

[0852] EGFR is highly expressed in the kidney, particularly in the ascending limb of the loop of Henle where 70% of filtered magnesium is reabsorbed. Therefore, antibodies that interact with EGFR can interfere with magnesium transport. Hypomagnesemia, a low concentration of magnesium in the blood, can be a side effect of administration of an anti-EGFR antibody. In one study, five percent of patients receiving cetuximab therapy exhibited grade 3 or 4 hypomagnesemia.

[0853] The loop of Henle has a neutral pH (e.g., pH 6.9-7.4) (Dieleman et al. (2001) J. Acquir Immune Defic Syndr. 28(1):9-13; Dantzler et al. (2000) Pflugers Arch. 440(1):140-148.). Therefore, modified anti-EGFR antibodies that have increased activity at low pH than at neutral pH, such as the modified anti-EGFR antibodies provided herein, can have decreased hypomagnesemia.

[0854] Hypomagnesemia can be diagnosed and/or assessed by measurement of serum magnesium levels. For example, the CTCAE classifies Grade 1 hypomagnesemia as a serum magnesium concentration of <Lower Limit of Normal (LLN)-1.2 mg/dL; Grade 2 hypomagnesemia as 1.2-0.9 mg/dL serum magnesium; Grade 3 hypomagnesemia as <0.9-0.7 mg/dL serum magnesium, Grade 4 hypomagnesemia as <0.7 mg/dL serum magnesium and can be accompanied by life-threatening consequences and Grade 5 hypomagnesemia results in death. In addition, symptoms of hypomagnesemia are known to the skilled artisan and include fatigue, paresthesias and hypocalcemia. (CTCAE v. 4.03, U.S. Department of Health and Human Services, published Jun. 14, 2010; Schrag J. Natl. Cancer. Inst. 97(16):1221-1224).

[0855] d. Other Methods of Selecting or Identifying Subjects for Treatment

[0856] Other methods of screening candidates for therapy known in the art are contemplated. For example, Kirsten rat sarcoma viral oncogene homolog (KRAS) mutation status has recently been shown to be predictive of response to cetuximab therapy in colorectal cancer (Van Cutsem et al. (2008) J. Clin. Oncol 26 (May 20 suppl): Abstract 2). KRAS is a GTPase with a role in a number of signal transduction pathways. Mutations in the gene which encodes KRAS, present in over 25% of colorectal cancers, is predictive of the success of EGFR-inhibiting drugs. Expression of the mutated KRAS gene results in a diminished response to EGFR-inhibitor therapy. KRAS mutations can be detected by commercially available laboratory diagnostics.

[0857] 3. Dosages

[0858] In the methods provided herein, a therapeutically effective amount of an anti-EGFR antibody or antibody fragment can be administered. Such dosage can be empirically determined by one of skill in the art, such as the treating physician. In some examples, the administered dosages are based on reference to dosage amounts of known anti-EGFR antibodies, such as Cetuximab, for a particular disease or condition. The therapeutically effective concentration of a anti-EGFR antibody, such as a modified anti-EGFR antibody, provided herein can be determined empirically by testing the anti-EGFR antibodies in known in vitro and in vivo systems such as by using the assays provided herein or known in the art.

[0859] An effective amount of anti-EGFR antibody to be administered therapeutically will depend, for example, upon the therapeutic objectives, the route of administration, and the condition of the patient. In addition, the attending physician can take into consideration various factors known to modify the action of drugs, including severity and type of disease, patient's health, body weight, sex, diet, time and route of administration, other medications and other relevant clinical factors. In addition, the therapist can consider the incidence and severity of side effects, such as side effects described herein or known in the art. Accordingly, the therapist can titer the dosage of the antibody or antigen-binding fragment thereof and modify the route of administration as required to obtain the optimal therapeutic effect and minimize undesirable side effects. The clinician can administer the antibody until a dosage is reached that achieves the desired effect. The progress of this therapy can be monitored by conventional assays described herein or known in the art. The dose of the modified anti-EGFR antibody can be varied to identify the optimal or minimal dose required to achieve activity while reducing or eliminating side effects.

[0860] Generally, the dosage ranges for the administration of the anti-EGFR antibody, such as modified anti-EGFR antibodies, provided herein are those large enough to produce the desired therapeutic effect in which the symptom(s) of the condition responsive to treatment with an anti-EGFR antibody are ameliorated. Generally, the dosage will vary with the age, condition, sex and the extent of the disease in the patient and can be determined by one of skill in the art. In some examples, the dosage is not so large as to cause adverse side effects. The dosage can be adjusted by the individual physician in the event of the appearance of any adverse side effect. Exemplary dosages include, but are not limited to, about or 0.1 mg/kg to 100 mg/kg, such as at least about or about 0.1 mg/kg, about or 0.15 mg/kg, about or 0.2 mg/kg, about or 0.25 mg/kg, about or 0.30 mg/kg, about or 0.35 mg/kg, about or 0.40 mg/kg, about or 0.45 mg/kg, about or 0.5 mg/kg, about or 0.55 mg.kg, about or 0.6 mg/kg, about or 0.7 mg/kg, about or 0.8 mg/kg, about or 0.9 mg/kg, about or 1.0 mg/kg, about or 1.1 mg/kg, about or 1.2 mg/kg, about or 1.3 mg/kg, about or 1.4 mg/kg, about or 1.5 mg/kg, about or 1.6 mg/kg, about or 1.7 mg/kg, about or 1.8 mg/kg, about or 1.9 mg/kg, about or 2 mg/kg, about or 2.5 mg/kg, about or 3 mg/kg, about or 3.5 mg/kg, about or 4 mg/kg, about or 4.5 mg/kg, about or 5 mg/kg, about or 5.5 mg/kg, about or 6 mg/kg, about or 6.5 mg/kg, about or 7 mg/kg, about or 7.5 mg/kg, about or 8 mg/kg, about or 8.5 mg/kg, about or 9 mg/kg, about or 9.5 mg/kg, about or 10 mg/kg, about or 11 mg/kg, about or 12 mg/kg, about or 13 mg/kg, about or 14 mg/kg, about or 15 mg/kg, about or 16 mg/kg, about or 17 mg/kg, about or 18 mg/kg, about or 19 mg/kg, about or 20 mg/kg, about or 21 mg/kg, about or 22 mg/kg, about or 23 mg/kg, about or 24 mg/kg, about or 25 mg/kg, about or 30 mg/kg, about or 40 mg/kg, about or 50 mg/kg, about or 60 mg/kg, about or 70 mg/kg, about or 80 mg/kg, about or 90 mg/kg, about or 100 mg/kg or more. In some examples, exemplary dosages include, but are not limited to, about or 0.01 mg/m² to about or 800 mg/m², such as for example, at least about or about or 0.01 mg/m², about or 0.1 mg/m², about or 0.5 mg/m², about or 1 mg/m², about or 5 mg/m², about or 10 mg/m², about or 15 mg/m², about or 20 mg/m², about or 25 mg/m², about or 30 mg/m², about or 35 mg/m², about or 40 mg/m², about or 45 mg/m², about or 50 mg/m², about or 100 mg/m², about or 150 mg/m², about or 200 mg/m², about or 250 mg/m², about or 300 mg/m², about or 400 mg/m², about or 500 mg/m², about or 600 mg/m² and about or 700 mg/m². It is understood that one of skill in the art can recognize and convert dosages between units of mg/kg and mg/m² (see, e.g., Michael J. Derelanko, TOXICOLOGIST'S POCKET HANDBOOK, CRC Press, p. 16 (2000)).

[0861] For treatment of a disease or condition, the dosage of the anti-EGFR antibodies can vary depending on the type and severity of the disease. The anti-EGFR antibodies can be administered in a single dose, in multiple separate administrations, or by continuous infusion. For repeated administrations over several days or longer, depending on the condition, the treatment can be repeated until a desired suppression of disease symptoms occurs or the desired improvement in the patient's condition is achieved. Repeated administrations can include increased or decreased amounts of the anti-EGFR antibody depending on the progress of the treatment. For example, an initial loading dose can be larger than a maintenance dose. In some examples, the initial loading dose is 400 mg/m², and the maintenance dose is 250 mg/m².

[0862] Other dosage regimens also are contemplated. For example, the dosage regime can be varied. Anti-EGFR antibodies, such as modified anti-EGFR antibodies, that are associated with reduced side effects can be used at higher dosing regimens. In addition, anti-EGFR antibodies that have increased activity in diseased tissues can be used at lower dosing regimens. Methods of determining activity of anti-EGFR antibodies, including the modified anti-EGFR antibodies described herein, are known to one of skill in the art and exemplary methods are described herein. In addition, the dosage regime can be empirically determined. The optimal quantity and spacing of individual dosages of an anti-EGFR antibody of the disclosure will be determined by the nature and extent of the condition being treated, the form, the route and site of administration, and the age and condition of the particular subject being treated, and a physician can determine appropriate dosages to be used. This dosage can be repeated as often as appropriate. If side effects develop, the amount and/or frequency of the dosage can be altered or reduced, in accordance with normal clinical practice. Such studies are within the level of one of skill in the art.

[0863] In some examples, the anti-EGFR antibodies are administered one time, two times, three times, four times, five times, six times, seven times, eight times, nine times, ten times or more per day or over several days. In some examples, the anti-EGFR antibodies are administered in a sequence of two or more administrations, where the administrations are separated by a selected time period. In some examples, the selected time period is at least or about 1 day, 2 days, 3 days, 4 days, 5 days, 6 days, 1 week, 2 weeks, 3 weeks, 1 month, 2 months, or 3 months.

[0864] Side effects of a particular dosage or dosage regimen also can be assessed, for example, by any methods described herein or known in the art, following administration of one or more doses of the anti-EGFR antibody thereof. Dosage amounts and/or frequency of administration can be modified depending on the type and severity of the side effect(s).

[0865] As will be understood by one of skill in the art, the optimal treatment regimen will vary and it is within the scope of the treatment methods to evaluate the status of the disease under treatment and the general health of the patient prior to, and following one or more cycles of therapy in order to determine the optimal therapeutic dosage and frequency of administration. It is to be further understood that for any particular subject, specific dosage regimens can be adjusted over time according to the individual need and the professional judgment of the person administering or supervising the administration of the pharmaceutical formulations, and that the dosages set forth herein are exemplary only and are not intended to limit the scope thereof. The amount of an anti-EGFR antibody to be administered for the treatment of a disease or condition, such as a disease or condition described herein, can be determined by standard clinical techniques described herein or known in the art. In addition, in vitro assays and animal models can be employed to help identify optimal dosage ranges. Such assays can provide dosages ranges that can be extrapolated to administration to subjects, such as humans. Methods of identifying optimal dosage ranges based on animal models are well known by those of skill in the art, and examples are described herein.

[0866] 4. Routes of Administration

[0867] The anti-EGFR antibodies, such as modified anti-EGFR antibodies, provided herein can be administered to a subject by any method known in the art for the administration of polypeptides, including for example systemic or local administration. The anti-EGFR antibodies can be administered by routes, such as parenteral (e.g., intradermal, intramuscular, intraperitoneal, intravenous, subcutaneous, or intracavity), topical, epidural, or mucosal (e.g. intranasal, oral, vaginally, vulvovaginal, esophageal, oroesophageal, bronchial, or pulmonary). The anti-EGFR antibodies can be administered externally to a subject, at the site of the disease for exertion of local or transdermal action. Compositions containing anti-EGFR antibodies or antigen-binding fragments can be administered by any convenient route, for example by infusion or bolus injection, by absorption through epithelial or mucocutaneous linings (e.g., oral mucosa, vaginal, rectal and intestinal mucosa). Compositions containing anti-EGFR antibodies or antigen-binding fragments can be administered together with other biologically active agents. In particular examples, the anti-EGFR antibodies are administered by infusion delivery, such as by infusion pump or syringe pump, and can be administered in combination with another therapeutic agent or as a monotherapy

[0868] The method and/or route of administration can be altered to alleviate adverse side effects associated with administration of a anti-EGFR antibody provided herein. For example, if a patient experiences a mild or moderate (i.e., Grade 1 or 2) infusion reaction, the infusion rate can be reduced (e.g. reduced by 10%, 20%, 30%, 40%, 50%, 60%, 70%, 80%, 90% or more). If the patient experiences severe (i.e., Grade 3 or 4) infusion reactions, the infusion can be temporarily or permanently discontinued.

[0869] In some examples, if the subject experiences an adverse side effect, such as severe skin toxicity, for example severe acneform rash, treatment adjustments can be made. For example, after the occurrence of an adverse side effect, administration can be delayed, such as for 1 to 2 weeks or until the adverse side effect improves. In some examples, after additional occurrences of an adverse side effect, the dosage can be reduced. For example, if the dose is 250 mg/m², after the second occurrence of an adverse side effect, administration of the anti-EGFR antibody can be delayed for 1 to 2 weeks. If the side effect improves, administration of the anti-EGFR antibody can continue with the dose reduced to 250 mg/m². After the third occurrence of the side effect, administration of the anti-EGFR antibody can be delayed for 1 to 2 weeks. If the side effect improves, administration of the anti-EGFR antibody can continue with the dose reduced to 150 mg/m². After several occurrences of an adverse side effect, administration of the anti-EGFR antibody can be discontinued. In patients with mild or moderate skin toxicity, the skilled artisan can continue administration without dose modification. Such determinations are within the ability of the skilled artisan.

[0870] Appropriate methods for delivery, can be selected by one of skill in the art based on the properties of the dosage amount of the anti-EGFR antibody or the pharmaceutical composition containing the antibody or antigen-binding fragment thereof. Such properties include, but are not limited to, solubility, hygroscopicity, crystallization properties, melting point, density, viscosity, flow, stability and degradation profile.

[0871] 5. Combination Therapies

[0872] In the methods provided herein, the anti-EGFR antibodies, such as modified anti-EGFR antibodies, provided herein can be administered before, after, or concomitantly with one or more other therapeutic regimens or agents. The skilled medical practitioner can determine empirically, or by considering the pharmacokinetics and modes of action of the agents, the appropriate dose or doses of each therapeutic regimen or agent, as well as the appropriate timings and methods of administration. The additional therapeutic regimes or agents can improve the efficacy or safety of the anti-EGFR antibody. In some examples, the additional therapeutic regimes or agents can treat the same disease or a comorbidity rather than to alter the action of the anti-EGFR antibody. In some examples, the additional therapeutic regimes or agents can ameliorate, reduce or eliminate one or more side effects known in the art or described herein that are associated with administration of an anti-EGFR antibody.

[0873] For example, an anti-EGFR antibody described herein can be administered with chemotherapy, radiation therapy, or both chemotherapy and radiation therapy. The modified anti-EGFR antibodies can be administered in combination with one or more other prophylactic or therapeutic agents, including but not limited to antibodies, cytotoxic agents, chemotherapeutic agents, cytokines, growth inhibitory agents, anti-hormonal agents, kinase inhibitors, anti-angiogenic agents, cardioprotectants, immunostimulatory agents, immunosuppressive agents, agents that promote proliferation of hematological cells, angiogenesis inhibitors, protein tyrosine kinase (PTK) inhibitors, additional anti-EGFR antibodies, FcγRIIb or other Fc receptor inhibitors, or other therapeutic agents.

[0874] The one or more additional agents can be administered simultaneously, sequentially or intermittently with the anti-EGFR antibody thereof. The agents can be co-administered with the anti-EGFR antibody thereof, for example, as part of the same pharmaceutical composition or same method of delivery. In some examples, the agents can be co-administered with the anti-EGFR antibody at the same time as the modified anti-EGFR antibody thereof, but by a different means of delivery. The agents also can be administered at a different time than administration of the anti-EGFR antibody thereof, but close enough in time to the administration of the anti-EGFR antibody to have a combined prophylactic or therapeutic effect. In some examples, the one or more additional agents are administered subsequent to or prior to the administration of the anti-EGFR antibody separated by a selected time period. In some examples, the time period is 1 day, 2 days, 3 days, 4 days, 5 days, 6 days, 1 week, 2 weeks, 3 weeks, 1 month, 2 months, or 3 months. In some examples, the one or more additional agents are administered multiple times and/or the anti-EGFR antibody provided herein is administered multiple times.

[0875] In some examples, an anti-EGFR antibody, such as a modified anti-EGFR antibody, provided herein is administered with one or more antibodies or antibody fragments. The anti-EGFR antibody can be administered with one or more other antibodies that have efficacy in treating the same disease or an additional comorbidity. For example, the one or more antibodies administered with the anti-EGFR antibody can be selected from among anti-cancer antibodies, antibodies to treat autoimmune or inflammatory disease, antibodies to treat transplant rejection, antibodies to treat graft-versus-host-disease (GVHD) and antibodies to treat infectious diseases. In some examples, two or more of the anti-EGFR antibodies provided herein are administered in combination.

[0876] Examples of anti-cancer antibodies that can be co-administered with a anti-EGFR antibody provided herein include, but are not limited to, anti 17-IA cell surface antigen antibodies such as Panorex® (edrecolomab); anti-4-1BB antibodies; anti-4Dc antibodies; anti-A33 antibodies such as A33 and CDP-833; anti-α1 integrin antibodies such as natalizumab; anti-α4β7 integrin antibodies such as LDP-02; anti-αVβ1 integrin antibodies such as F-200, M-200, and SJ-749; anti-αVβ3 integrin antibodies such as abciximab, CNTO-95, Mab-17E6, and Vitaxin®; anti-complement factor 5 (C5) antibodies such as 5G1.1; anti-CA125 antibodies such as OvaRex® (oregovomab); anti-CD3 antibodies such as Nuvion® (visilizumab) and Rexomab; anti-CD4 antibodies such as IDEC-151, MDX-CD4, OKT4A; anti-CD6 antibodies such as Oncolysin B and Oncolysin CD6; anti-CD7 antibodies such as HB2; anti-CD19 antibodies such as B43, MT-103, and Oncolysin B; anti-CD20 antibodies such as 2H7, 2H7.v16, 2H7.v114, 2H7.v115, Bexxar® (tositumomab), Rituxan® (rituximab), and Zevalin® (Ibritumomab tiuxetan); anti-CD22 antibodies such as Lymphocide® (epratuzumab); anti-CD23 antibodies such as IDEC-152; anti-CD25 antibodies such as basiliximab and Zenapax® (daclizumab); anti-CD30 antibodies such as AC10, MDX-060, and SGN-30; anti-CD33 antibodies such as Mylotarg® (gemtuzumab ozogamicin), Oncolysin M, and Smart M195; anti-CD38 antibodies; anti-CD40 antibodies such as SGN-40 and toralizumab; anti-CD40L antibodies such as 5c8, Antova®, and IDEC-131; anti-CD44 antibodies such as bivatuzumab; anti-CD46 antibodies; anti-CD52 antibodies such as Campath® (alemtuzumab); anti-CD55 antibodies such as SC-1; anti-CD56 antibodies such as huN901-DM1; anti-CD64 antibodies such as MDX-33; anti-CD66e antibodies such as XR-303; anti-CD74 antibodies such as IMMU-1 10; anti-CD80 antibodies such as galiximab and IDEC-1 14; anti-CD89 antibodies such as MDX-214; anti-CD123 antibodies; anti-CD138 antibodies such as B-B4-DM 1; anti-CD 146 antibodies such as AA-98; anti-CD148 antibodies; anti-CEA antibodies such as cT84.66, labetuzumab, and Pentacea®; anti-CTLA-4 antibodies such as MDX-101; anti-CXCR4 antibodies; anti-EGFR antibodies such as ABX-EGF, Erbitux® (cetuximab), IMC-C225, and Merck Mab 425; anti-EpCAM antibodies such as Crucell's anti-EpCAM, ING-1, and IS-IL-2; anti-ephrin B2/EphB4 antibodies; anti-Her2 antibodies such as Herceptin®), MDX-210; anti-FAP (fibroblast activation protein) antibodies such as sibrotuzumab; anti-ferritin antibodies such as NXT-211; anti-FGF-1 antibodies; anti-FGF-3 antibodies; anti-FGF-8 antibodies; anti-FGFR antibodies, anti-fibrin antibodies; anti-G250 antibodies such as WX-G250 and Rencarex®; anti-GD2 ganglioside antibodies such as EMD-273063 and TriGem; anti-GD3 ganglioside antibodies such as BEC2, KW-2871, and mitumomab; anti-gpllb/IIIa antibodies such as ReoPro; anti-heparinase antibodies; anti-Her2/ErbB2 antibodies such as Herceptin® (trastuzumab), MDX-210, and pertuzumab; anti-HLA antibodies such as Oncolym®, Smart 1D10; anti-HM 1.24 antibodies; anti-ICAM antibodies such as ICM3; anti-IgA receptor antibodies; anti-IGF-1 antibodies such as CP-751871 and EM-164; anti-IGF-1R antibodies such as IMC-A12; anti-IL-6 antibodies such as CNTO-328 and elsilimomab; anti-IL-15 antibodies such as HuMax®-IL15; anti-KDR antibodies; anti-laminin 5 antibodies; anti-Lewis Y antigen antibodies such as Hu3S193 and IGN-311; anti-MCAM antibodies; anti-Mucl antibodies such as BravaRex and TriAb; anti-NCAM antibodies such as ERIC-1 and ICRT; anti-PEM antigen antibodies such as Theragyn and Therex; anti-PSA antibodies; anti-PSCA antibodies such as IG8; anti-Ptk antibodies; anti-PTN antibodies; anti-RANKL antibodies such as AMG-162; anti-RLIP76 antibodies; anti-SK-1 antigen antibodies such as Monopharm C; anti-STEAP antibodies; anti-TAG72 antibodies such as CC49-SCA and MDX-220; anti-TGF-β antibodies such as CAT-152; anti-TNF-α antibodies such as CDP571, CDP870, D2E7, Humira® (adalimumab), and Remicade® (infliximab); anti-TRAIL-R1 and TRAIL-R2 antibodies; anti-VE-cadherin-2 antibodies; and anti-VLA-4 antibodies such as Antegren®. Furthermore, anti-idiotype antibodies including but not limited to the GD3 epitope antibody BEC2 and the gp72 epitope antibody 105AD7, can be used. In addition, bispecific antibodies including but not limited to the anti-CD3/CD20 antibody Bi20 can be used.

[0877] Examples of antibodies that can treat autoimmune or inflammatory disease, transplant rejection, GVHD, that can be co-administered with a modified anti-EGFR antibody provided herein include, but are not limited to, anti-α4β7 integrin antibodies such as LDP-02, anti-beta2 integrin antibodies such as LDP-01, anti-complement (C5) antibodies such as 5G1.1, anti-CD2 antibodies such as BTI-322, MEDI-507, anti-CD3 antibodies such as OKT3, SMART anti-CD3, anti-CD4 antibodies such as IDEC-151, MDX-CD4, OKT4A, anti-CD11a antibodies, anti-CD14 antibodies such as IC14, anti-CD 18 antibodies, anti-CD23 antibodies such as IDEC 152, anti-CD25 antibodies such as Zenapax, anti-CD40L antibodies such as 5c8, Antova, IDEC-131, anti-CD64 antibodies such as MDX-33, anti-CD80 antibodies such as IDEC-114, anti-CD147 antibodies such as ABX-CBL, anti-E-selectin antibodies such as CDP850, anti-gpllb/IIIa antibodies such as ReoPro®/Abcixima, anti-ICAM-3 antibodies such as ICM3, anti-ICE antibodies such as VX-740, anti-FcγR1 antibodies such as MDX-33, anti-IgE antibodies such as rhuMab-E25, anti-IL-4 antibodies such as SB-240683, anti-IL-5 antibodies such as SB-240563, SCH55700, anti-IL-8 antibodies such as ABX-IL8, anti-interferon gamma antibodies, and anti-TNFa antibodies such as CDP571, CDP870, D2E7, Infliximab, MAK-195F, anti-VLA-4 antibodies such as Antegren. Examples of other Fc-containing molecules that can be co-administered to treat autoimmune or inflammatory disease, transplant rejection and GVHD include, but are not limited to, the p75 TNF receptor/Fc fusion Enbrel® (etanercept) and Regeneron's IL-1 trap.

[0878] Examples of antibodies that can be co-administered to treat infectious diseases include, but are not limited to, anti-anthrax antibodies such as ABthrax, anti-CMV antibodies such as CytoGam and sevirumab, anti-cryptosporidium antibodies such as CryptoGAM, Sporidin-G, anti-helicobacter antibodies such as Pyloran, anti-hepatitis B antibodies such as HepeX-B, Nabi-HB, anti-HIV antibodies such as HRG-214, anti-RSV antibodies such as felvizumab, HNK-20, palivizumab, RespiGam, and anti-staphylococcus antibodies such as Aurexis, Aurograb, BSYX-A110, and SE-Mab.

[0879] In some examples, an anti-EGFR antibody, such as a modified anti-EGFR antibody, described herein is administered with one or more molecules that compete for binding to one or more Fc receptors. For example, co-administering inhibitors of the inhibitory receptor FcγRIIb can result in increased effector function. Similarly, co-administering inhibitors of the activating receptors such as FcγRIIIa can minimize unwanted effector function. Fc receptor inhibitors include, but are not limited to, Fc molecules that are engineered to act as competitive inhibitors for binding to FcγRIIb, FcγRIIIa, or other Fc receptors, as well as other immunoglobulins and specifically the treatment called IVIg (intravenous immunoglobulin). In one embodiment, the inhibitor is administered and allowed to act before the anti-EGFR antibody is administered. An alternative way of achieving the effect of sequential dosing would be to provide an immediate release dosage form of the Fc receptor inhibitor and then a sustained release formulation of the anti-EGFR antibody. The immediate release and controlled release formulations could be administered separately or be combined into one unit dosage form.

[0880] In some examples, an anti-EGFR antibody, such as a modified anti-EGFR antibody, described herein is administered with one or more chemotherapeutic agents. Examples of chemotherapeutic agents include but are not limited to alkylating agents such as thiotepa and cyclosphosphamide (CYTOXAN®); alkyl sulfonates such as busulfan, improsulfan and piposulfan; androgens such as calusterone, dromostanolone propionate, epitiostanol, mepitiostane, testolactone; anti-adrenals such as aminoglutethimide, mitotane, trilostane; anti-androgens such as flutamide, nilutamide, bicalutamide, leuprolide, and goserelin; antibiotics such as aclacinomycins, actinomycin, anthramycin, azaserine, bleomycins, cactinomycin, calicheamicin, carubicin, caminomycin, carzinophilin, chromomycins, dactinomycin, daunorubicin, detorubicin, 6-diazo-5-oxo-L-norleucine, doxorubicin, epirubicin, esorubicin, idarubicin, marcellomycin, mitomycins, mycophenolic acid, nogalamycin, olivomycins, peplomycin, porfiromycin, puromycin, quelamycin, rodorubicin, streptonigrin, streptozocin, tubercidin, ubenimex, zinostatin, zorubicin; anti estrogens including for example tamoxifen, raloxifene, aromatase inhibiting 4(5)-imidazoles, 4-hydroxytamoxifen, trioxifene, keoxifene, LY 117018, onapristone, and toremifene (Fareston); anti-metabolites such as methotrexate and 5-fluorouracil (5-FU); folic acid analogues such as denopterin, methotrexate, pteropterin, trimetrexate; aziridines such as benzodepa, carboquone, meturedepa, and uredepa; ethylenimines and methylmelamines including altretamine, triethylenemelamine, triethylenephosphoramide, triethylenethiophosphoramide and trimethylol melamine; folic acid replenisher such as folinic acid; nitrogen mustards such as chlorambucil, chlornaphazine, chlorophosphamide, estramustine, ifosfamide, mechlorethamine, mechlorethamine oxide hydrochloride, melphalan, novembichin, phenesterine, prednimustine, trofosfamide, uracil mustard; nitrosoureas such as carmustine, chlorozotocin, fotemustine, lomustine, nimustine, ranimustine; platinum analogs such as cisplatin and carboplatin; vinblastine; platinum; proteins such as arginine deiminase and asparaginase; purine analogs such as fludarabine, 6-mercaptopurine, thiamiprine, thioguanine; pyrimidine analogs such as ancitabine, azacitidine, 6-azauridine, carmofur, cytarabine, dideoxyuridine, doxifluridine, enocitabine, floxuridine, 5-FU; taxanes, e.g. paclitaxel (TAXOL®, Bristol-Myers Squibb Oncology, Princeton, N.J.) and docetaxel (TAXOTERE®), Rhone-Poulenc Rorer, Antony, France); topoisomerase inhibitor RFS 2000; thymidylate synthase inhibitor (such as Tomudex); additional chemotherapeutics including aceglatone; aldophosphamide glycoside; aminolevulinic acid; amsacrine; bestrabucil; bisantrene; edatrexate; defosfamide; demecolcine; diaziquone; difluoromethylornithine (DMFO); eflornithine; elliptinium acetate; etoglucid; gallium nitrate; hydroxyurea; lentinan; lonidamine; mitoguazone; mitoxantrone; mopidamol; nitracrine; pentostatin; phenamet; pirarubicin; podophyllinic acid; 2-ethylhydrazide; procarbazine; PSK®; razoxane; sizofiran; spirogermanium; tenuazonic acid; triaziquone; 2,2′,2″-trichlorotriethylamine; urethan; vindesine; dacarbazine; mannomustine; mitobronitol; mitolactol; pipobroman; gacytosine; arabinoside (“Ara-C”); cyclophosphamide; thiotepa; chlorambucil; gemcitabine; 6-thioguanine; mercaptopurine; methotrexate; etoposide (VP-16); ifosfamide; mitomycin C; mitoxantrone; vincristine; vinorelbine; Navelbine; Novantrone; teniposide; daunomycin; aminopterin; Xeloda; ibandronate; CPT-11;retinoic acid; esperamycins; capecitabine; and topoisomerase inhibitors such as irinotecan. Pharmaceutically acceptable salts, acids or derivatives of any of the above can also be used. In some examples, a modified anti-EGFR antibody provided herein is administered with irinotecan (see, e.g., Pfeiffer et al. (2007) Acta. Oncol. 46(5):697-701).

[0881] A chemotherapeutic agent can be administered as a prodrug. Examples of prodrugs that can be administered with an anti-EGFR antibody described herein include, but are not limited to, phosphate-containing prodrugs, thiophosphate-containing prodrugs, sulfate-containing prodrugs, peptide-containing prodrugs, D-amino acid-modified prodrugs, glycosylated prodrugs, beta-lactam-containing prodrugs, optionally substituted phenoxy acetamide-containing prodrugs or optionally substituted phenylacetamide-containing prodrugs, 5-fluorocytosine and other 5-fluorouridine prodrugs which can be converted into the more active cytotoxic free drug.

[0882] In some examples, an anti-EGFR antibody, such as a modified anti-EGFR antibody, provided herein is administered with one or more anti-angiogenic agents. For example, the anti-angiogenic factor can be a small molecule or a protein (e.g., an antibody, Fc fusion, or cytokine) that binds to a growth factor or growth factor receptor involved in promoting angiogenesis. Examples of anti-angiogenic agents include but are not limited to antibodies that bind to Vascular Endothelial Growth Factor (VEGF) or that bind to VEGF-R, RNA-based therapeutics that reduce levels of VEGF or VEGF-R expression, VEGF-toxin fusions, Regeneron's VEGF-trap, angiostatin (plasminogen fragment), antithrombin III, angiozyme, ABT-627, Bay 12-9566, BeneFin, bevacizumab, bisphosphonates, BMS-275291, cartilage-derived inhibitor (CDI), CAI, CD59 complement fragment, CEP-7055, Col 3, Combretastatin A-4, endostatin (collagen XVIII fragment), farnesyl transferase inhibitors, fibronectin fragment, gro-beta, halofuginone, heparinases, heparin hexasaccharide fragment, HMV833, human chorionic gonadotropin (hCG), IM-862, interferon alpha, interferon beta, interferon gamma, interferon inducible protein 10 (IP-10), interleukin-12, kringle 5 (plasminogen fragment), marimastat, metalloproteinase inhibitors (e.g. TIMPs), 2-methodyestradiol, MMI 270 (CGS 27023A), plasminogen activator inhibitor (PAI), platelet factor-4 (PF4), prinomastat, prolactin 16 kDa fragment, proliferin-related protein (PRP), PTK 787/ZK 222594, retinoids, solimastat, squalamine, SS3304, SU5416, SU6668, SU11248, tetrahydrocortisol-S, tetrathiomolybdate, thalidomide, thrombospondin-1 (TSP-1), TNP470, transforming growth factor beta (TGF-β), vasculostatin, vasostatin (calreticulin fragment), ZS6126, and ZD6474.

[0883] In some examples, an anti-EGFR antibody, such as a modified anti-EGFR antibody, provided herein is administered with one or more tyrosine kinase inhibitors. Examples of tyrosine kinase inhibitors include but are not limited to quinazolines, such as PD 153035, 4-(3-chloroanilino) quinazoline; pyridopyrimidines; pyrimidopyrimidines; pyrrolopyrimidines, such as CGP 59326, CGP 60261 and CGP 62706; pyrazolopyrimidines, 4-(phenylamino)-7H-pyrrolo[2,3-d]pyrimidines; curcumin (diferuloylmethane, 4,5-bis(4-fluoroanilino) phthalimide); tyrphostins containing nitrothiophene moieties; PD-0183805 (Warner-Lambert); antisense molecules (e.g. those that bind to ErbB-encoding nucleic acid); quinoxalines (U.S. Pat. No. 5,804,396); tyrphostins (U.S. Pat. No. 5,804,396); ZD6474 (Astra Zeneca); PTK-787 (Novartis/Schering A G); pan-ErbB inhibitors such as CI-1033 (Pfizer); Affinitac (ISIS 3521; Isis/Lilly); Imatinib mesylate (STI571, Gleevec®; Novartis); PKI 166 (Novartis); GW2016 (Glaxo SmithKline); CI-1033 (Pfizer); EKB-569 (Wyeth); Semaxinib (Sugen); ZD6474 (AstraZeneca); PTK-787 (Novartis/Schering A G); INC-1 C11 (Imclone); or as described in any of the following patent publications: U.S. Pat. No. 5,804,396; PCT WO 99/09016 (American Cyanimid); PCT WO 98/43960 (American Cyanamid); PCT WO 97/38983 (Warner-Lambert); PCT WO 99/06378 (Warner-Lambert); PCT WO 99/06396 (Warner-Lambert); PCT WO 96/30347 (Pfizer, Inc); PCT WO 96/33978 (AstraZeneca); PCT WO96/3397 (AstraZeneca); PCT WO 96/33980 (AstraZeneca), gefitinib (Iressa®, ZD1839, AstraZeneca), and OSI-774 (Tarceva®, OSI Pharmaceuticals/Genentech).

[0884] In some examples, an anti-EGFR antibody, such as a modified anti-EGFR antibody, described herein is administered with one or more immunomodulatory agents. Such agents can increase or decrease production of one or more cytokines, up- or down-regulate self-antigen presentation, mask MHC antigens, or promote the proliferation, differentiation, migration, or activation state of one or more types of immune cells. Examples of immunomodulatory agents include but are not limited to non-steroidal anti-inflammatory drugs (NSAIDs) such as aspirin, ibuprofen, celecoxib, diclofenac, etodolac, fenoprofen, indomethacin, ketorolac, oxaprozin, nabumetone, sulindac, tolmetin, rofecoxib, naproxen, ketoprofen, and nabumetone; steroids (e.g. glucocorticoids, dexamethasone, cortisone, hydroxycortisone, methylprednisolone, prednisone, prednisolone, triamcinolone, azulfidine eicosanoids such as prostaglandins, thromboxanes, and leukotrienes; as well as topical steroids such as anthralin, calcipotriene, clobetasol, and tazarotene); cytokines such as TGFb, IFNa, IFNb, IFNg, IL-2, IL4, IL-10; cytokine, chemokine, or receptor antagonists including antibodies, soluble receptors, and receptor-Fc fusions against BAFF, B7, CCR2, CCR5, CD2, CD3, CD4, CD6, CD7, CD8, CD11, CD14, CD15, CD17, CD18, CD20, CD23, CD28, CD40, CD40L, CD44, CD45, CD52, CD64, CD80, CD86, CD 147, CD 152, complement factors (C5, D) CTLA4, eotaxin, Fas, ICAM, ICOS, IFNα, IFNβ, IFNγ, IFNAR, IgE, IL-1, IL-2, IL-2R, IL-4, IL-5R, IL-6, IL-8, IL-9 IL-12, IL-13, IL-13R1, IL-15, IL-18R, IL-23, integrins, LFA-1, LFA-3, MHC, selectins, TGFβ, TNFα, TNFβ, TNF-R1, T-cell receptor, including Enbrel® (etanercept), Humira® (adalimumab), and Remicade® (infliximab); heterologous anti-lymphocyte globulin; other immunomodulatory molecules such as 2-amino-6-aryl-5 substituted pyrimidines, anti-idiotypic antibodies for MHC binding peptides and MHC fragments, azathioprine, brequinar, Bromocryptine, cyclophosphamide, cyclosporine A, D-penicillamine, deoxyspergualin, FK506, glutaraldehyde, gold, hydroxychloroquine, leflunomide, malononitriloamides (e.g. leflunomide), methotrexate, minocycline, mizoribine, mycophenolate mofetil, rapamycin, and sulfasalazine.

[0885] In some examples, an anti-EGFR antibody, such as a modified anti-EGFR antibody, described herein is administered with one or more cytokines. Examples of cytokines include but are not limited to lymphokines, monokines, and traditional polypeptide hormones. Included among the cytokines are growth hormone such as human growth hormone, N-methionyl human growth hormone, and bovine growth hormone; parathyroid hormone; thyroxine; insulin; proinsulin; relaxin; prorelaxin; glycoprotein hormones such as follicle stimulating hormone (FSH), thyroid stimulating hormone (TSH), and luteinizing hormone (LH); hepatic growth factor; fibroblast growth factor; prolactin; placental lactogen; tumor necrosis factor-alpha and -beta; mullerian-inhibiting substance; mouse gonadotropin-associated peptide; inhibin; activin; vascular endothelial growth factor; integrin; thrombopoietin (TPO); nerve growth factors such as NGF-beta; platelet-growth factor; transforming growth factors (TGFs) such as TGF-alpha and TGF-beta; insulin-like growth factor-I and -II; erythropoietin (EPO); osteoinductive factors; interferons such as interferon-alpha, beta, and -gamma; colony stimulating factors (CSFs) such as macrophage-CSF (M-CSF); granulocyte-macrophage-CSF (GM-CSF); and granulocyte-CSF (G-CSF); interleukins (ILs) such as IL-1, IL-1alpha, IL-2, IL-3, IL-4, IL-5, IL-6, IL-7, IL-8, IL-9, IL-10, IL-11, IL-12; IL-15, a tumor necrosis factor such as TNF-alpha or TNF-beta; and other polypeptide factors including LIF and kit ligand (KL).

[0886] In some examples, an anti-EGFR antibody, such as a modified anti-EGFR antibody, described herein is administered with one or more cytokines or other agents that stimulate cells of the immune system and enhance desired effector function. For example, agents that stimulate NK cells, including but not limited to IL-2 can be administered with an anti-EGFR antibody described herein. In another embodiment, agents that stimulate macrophages, including but not limited to C5a, formyl peptides such as N-formyl-methionyl-leucyl-phenylalanine (Beigier-Bompadre et. al. (2003) Scand. J. Immunol. 57: 221-8), can be administered with an anti-EGFR antibody described herein. Also, agents that stimulate neutrophils, including but not limited to G-CSF and GM-CSF, can be administered with an anti-EGFR antibody described herein. Furthermore, agents that promote migration of such immunostimulatory cytokines can be administered with an anti-EGFR antibody described herein. Also additional agents including but not limited to interferon gamma, IL-3 and IL-7 can promote one or more effector functions. In some examples, an anti-EGFR antibody described herein is administered with one or more cytokines or other agents that inhibit effector cell function.

[0887] In some examples, an anti-EGFR antibody described herein is administered with one or more antibiotics, including but not limited to: aminoglycoside antibiotics (e.g. apramycin, arbekacin, bambermycins, butirosin, dibekacin, gentamicin, kanamycin, neomycin, netilmicin, paromomycin, ribostamycin, sisomicin, spectinomycin), aminocyclitols (e.g. spectinomycin), amphenicol antibiotics (e.g. azidamfenicol, chloramphenicol, florfenicol, and thiamphenicol), ansamycin antibiotics (e.g. rifamide and rifampin), carbapenems (e.g. imipenem, meropenem, panipenem); cephalosporins (e.g. cefaclor, cefadroxil, cefamandole, cefatrizine, cefazedone, cefozopran, cefpimizole, cefpiramide, cefpirome, cefprozil, cefuroxime, cefixime, cephalexin, cephradine), cephamycins (cefbuperazone, cefoxitin, cefminox, cefmetazole, and cefotetan); lincosamides (e.g. clindamycin, lincomycin); macrolide (e.g. azithromycin, brefeldin A, clarithromycin, erythromycin, roxithromycin, tobramycin), monobactams (e.g. aztreonam, carumonam, and tigemonam); mupirocin; Oxacephems (e.g. flomoxef, latamoxef, and moxalactam); penicillins (e.g. amdinocillin, amdinocillin pivoxil, amoxicillin, bacampicillin, benzylpenicillinic acid, benzylpenicillin sodium, epicillin, fenbenicillin, floxacillin, penamecillin, penethamate hydriodide, penicillin o-benethamine, penicillin O, penicillin V, penicillin V benzoate, penicillin V hydrabamine, penimepicycline, and phenethicillin potassium); polypeptides (e.g. bacitracin, colistin, polymixin B, teicoplanin, vancomycin); quinolones (amifloxacin, cinoxacin, ciprofloxacin, enoxacin, enrofloxacin, fleroxacin, flumequine, gatifloxacin, gemifloxacin, grepafloxacin, lomefloxacin, moxifloxacin, nalidixic acid, norfloxacin, ofloxacin, oxolinic acid, pefloxacin, pipemidic acid, rosoxacin, rufloxacin, sparfloxacin, temafloxacin, tosufloxacin, and trovafloxacin); rifampin; streptogramins (e.g. quinupristin, dalfopristin); sulfonamides (sulfanilamide, sulfamethoxazole); tetracyclines (chlortetracycline, demeclocycline hydrochloride, demethylchlortetracycline, doxycycline, Duramycin, minocycline, neomycin, oxytetracycline, streptomycin, tetracycline, and vancomycin).

[0888] In some examples, an anti-EGFR antibody, such as a modified anti-EGFR antibody, provided herein is administered with one or more anti-fungal agents, including but not limited to amphotericin B, ciclopirox, clotrimazole, econazole, fluconazole, flucytosine, itraconazole, ketoconazole, miconazole, nystatin, terbinafine, terconazole, and tioconazole. In some examples, an anti-EGFR antibody described herein is administered with one or more antiviral agents, including but not limited to protease inhibitors, reverse transcriptase inhibitors, and others, including type I interferons, viral fusion inhibitors, neuraminidase inhibitors, acyclovir, adefovir, amantadine, amprenavir, clevudine, enfuvirtide, entecavir, foscarnet, ganciclovir, idoxuridine, indinavir, lopinavir, pleconaril, ribavirin, rimantadine, ritonavir, saquinavir, trifluridine, vidarabine, and zidovudine.

[0889] An anti-EGFR antibody, such as a modified anti-EGFR antibody, provided herein can be combined with other therapeutic regimens. For example, in one embodiment, the patient to be treated with a modified anti-EGFR antibody provided herein can receive radiation therapy. Radiation therapy can be administered according to protocols commonly employed in the art and known to the skilled artisan. Such therapy includes but is not limited to cesium, iridium, iodine, or cobalt radiation. The radiation therapy can be whole body irradiation, or can be directed locally to a specific site or tissue in or on the body, such as the lung, bladder, or prostate. Typically, radiation therapy is administered in pulses over a period of time from about 1 to 2 weeks. The radiation therapy can, however, be administered over longer periods of time. For instance, radiation therapy can be administered to patients having head and neck cancer for about 6 to about 7 weeks. Optionally, the radiation therapy can be administered as a single dose or as multiple, sequential doses. The skilled medical practitioner can determine empirically the appropriate dose or doses of radiation therapy useful herein. In some examples, the anti-EGFR antibodies and optionally one or more other anti-cancer therapies are employed to treat cancer cells ex vivo. It is contemplated that such ex vivo treatment can be useful in bone marrow transplantation and particularly, autologous bone marrow transplantation. For instance, treatment of cells or tissue(s) containing cancer cells with a anti-EGFR antibody and one or more anti-cancer therapies, such as described herein, can be employed to deplete or substantially deplete the cancer cells prior to transplantation in a recipient patient.

[0890] Radiation therapy can also comprise treatment with an isotopically labeled molecule, such as an antibody. Examples of radioimmunotherapeutics include but Zevalin® (Y-90 labeled anti-CD20), LymphoCide® (Y-90 labeled anti-CD22) and Bexxar® (1-131 labeled anti-CD20).

[0891] In addition, it is contemplated that the anti-EGFR antibodies, such as modified anti-EGFR antibodies, provided herein can be administered to a patient or subject in combination with still other therapeutic techniques such as surgery or phototherapy.

### H. EXAMPLES

[0892] The following examples are included for illustrative purposes only and are not intended to limit the scope of the invention.

### Example 1

### Generation of Anti-EGFR Antibody Mutants and Screening for pH-Dependent Activity

[0893] 1. Primary Screen

[0894] a. Generation of Library

[0895] A reference Cetuximab anti-EGFR antibody was generated containing a light chain (SEQ ID NO:1110 and encoding SEQ ID NO:9) and a heavy chain (SEQ ID NO:1111 and encoding the complete heavy chain sequence set forth in SEQ ID NO:8), whereby a FLAG tag (SEQ ID NO:13) was linked at the C-terminal end of the constant domain and was cloned into an expression vector to encode an IgG antibody (full length DNA sequence set forth in SEQ ID NO:1109). A library of single point mutants of the Cetuximab anti-EGFR antibody was constructed and generated by site-directed mutagenesis. The library contained variants of Cetuximab anti-EGFR antibody, whereby each member contained a single amino acid mutation compared to the reference antibody at one of one hundred amino acid positions within the variable regions of either the heavy chain (SEQ ID NO:8 with the variable heavy chain set forth in SEQ ID NO:3) or light chain (SEQ ID NO:19 with the variable light chain set forth in SEQ ID NO:10) of Cetuximab. The positions that were varied were in the variable region of the light and heavy chains of the Cetuximab anti-EGFR antibody, with the majority of positions in the CDRs of the light or heavy chain (see FIG. 1). At least 15 amino acid mutations were made at each position, whereby the amino acid histidine was included among the 15 mutations at each position. The total number of single variant members of the library that were generated was 1501. Each member of the library was sequenced. Glycerol stocks of members of the library were prepared and stored at −80° C.

[0896] b. Screening of Library Members

[0897] For screening, an expression vector encoding a member of the library was separately expressed in CHO cells as IgG antibodies and supernatants collected. Plasmid DNA was transfected into monolayer CHO-S cells (Invitrogen, Cat. No. 11619-012) using Lipofectamine 2000 (Invitrogen, Cat. No. 11668-027) following the manufacturer's protocol. Briefly, CHO-S cells were seeded the night before transfection and grown in DMEM with 10% Fetal Bovine Serum (FBS). The next day, after the cells were 80% confluent, the medium of the CHO-S cells was replaced with Opti-MEM (Invitrogen). A mixture of plasmid DNA and Lipofectamine (0.2 μg DNA and 0.5 μL Lipofetamine) was added to the CHO-S cells and incubated overnight. The next day, the cells were supplemented with CD-CHO serum free media (Invitrogen, Cat. No. 10743-029). Supernatant from transfected cells was collected after transfection (generally 72 hours after transfection).

[0898] The supernatants were assayed for binding to soluble extracellular domain of EGF receptor (EGFR sECD) using a parallel, high-throughput pH sensitive ELISA under two conditions as described below. The EGFR sECD was conjugated to a His tag (sEGFR-H6) and was obtained commercially (Sin θ Biologics, Cat #10001-H08H).

[0899] Briefly, the sEGFR-H6 was immobilized on 96 well Hi-bind plates (Costar #2592) by coating the plate overnight at 4° C. or for 2 hours at room temperature (RT) with 100 μL sEGFR-H6 antigen at 12 nM (1.32 μg/mL) in Buffer A (Krebs-Ringer Buffer (KRB, Sigma Aldrich, #K4002), pH 7.4, no human serum). The plates were then washed 3× with 250 μL/well of Buffer A. Then, the plates were divided into two groups and the first group (pH 7.4 group) was subsequently blocked for 1 hour at RT with 250 μL of pH 7.4 Buffer B (1 mM lactic acid/25% human serum) and the second group (pH 6.0 group) was subsequently blocked for 1 hour at RT with 250 μL of pH 6.0 Buffer C (16.6 mM lactic acid/25% human serum), while covered.

[0900] One hundred microliters (100 μL) of FLAG-tagged anti-EGFR antibody variant supernatants of each variant member of the Cetuximab anti-EGFR antibody library described above were added at two dilutions (Dilution 1 and Dilution 2) each to a separate well of two 96-well plates (one of each group, pH 6.0 group and pH 7.4 group) containing the bound sEGFR-H6 antigen. For the dilutions, the clarified supernatant samples described above were diluted in either pH 7.4 Buffer B (KRB, pH 7.4, 1 mM lactic acid/25% human serum; group 1) or pH 6.0 Buffer C (KRB, pH 6.0, 16.6 mM lactic acid/25% human serum; group 2) at 1:20 (Dilution 1) or 1:100 (Dilution 2) in the same buffer. The reference Cetuximab anti-EGFR antibody conjugated to a FLAG tag (anti-EGFR-FLAG antibody) was used as a standard and serial dilutions (3×, starting concentration 30 ng/mL, followed by 1:3 dilutions) were prepared in either pH 7.4 Buffer B (KRB, pH 7.4, 1 mM lactic acid/25% human serum) or pH 6.0 Buffer C (KRB, pH 6.0, 16.6 mM lactic acid/25% human serum), and 100 μL was added per well. After dilution, concentrations of Cetuximab anti-EGFR-FLAG antibody were 200 pM (30 ng/mL), 66.67 pM (10 ng/mL), 22.22 pM (3.33 ng/mL), 7.41 pM (1.11 ng/mL), 2.47 pM (0.37 ng/mL), 0.82 pM (0.123 ng/mL) and O.

[0901] Plates containing the Cetuximab anti-EGFR-FLAG antibody standards and variant anti-EGFR-FLAG samples were covered and incubated at RT for 1 hr. The plate was then washed 3× with 250 μL/well of either pH 7.4 Buffer B or pH 6.0 Buffer C. 100 μL/well goat anti-FLAG-HRP detection antibody (Abcam, #ab 1238) at 500 ng/mL in either pH 7.4 Buffer B or pH 6.0 Buffer C was added to each well and the plate was covered and incubated for 1 hr at RT. The plate was then washed 3× with 250 μL/well of either pH 7.4 Buffer B or pH 6.0 Buffer C. Finally, 100 μL Sureblue TMB Microwell Peroxidase Substrate 1-component (KPL, #52-00-03) solution was added to each well and the plate was allowed to develop for 15-20 minutes at RT (away from light). The reaction was stopped by adding 100 μL TMB stop solution (KPL, #50-85-06) to each well and the plate was read within 30 min at OD₄₅₀ nM using a Microplate Spectrophotometer (Molecular Devices, Spectra Max M2).

[0902] c. Antibody Binding Results

[0903] The ELISA was performed in duplicate, and the average OD values of the duplicate reactions were calculated. Based on the OD value, variant anti-EGFR antibodies that exhibited higher binding activity to sEGFR-H6 at pH 6.0 (and 16.6 mM lactic acid) compared to at pH7.0 (and 1 mM lactic acid) were identified and are set forth in Table 15. The Table sets forth the average OD at pH 6.0 (OD_{6.0}), average OD at pH 7.4 (OD_{7.4}), and the ratio of the average OD values at pH 6.0 and 7.4 (OD_{6.0}/OD_{7.4}) for the variant antibodies at Dilution 1 and Dilution 2. Table 15 also sets forth the SEQ ID NOS of the variable region of the Heavy Chain (HC) and Light Chain (LC) of the variant anti-EGFR antibodies.

TABLE 15
Variant anti-EGFR antibodies

| | | Average OD | | Average OD | | | | SEQ ID | |
|---|---|---|---|---|---|---|---|---|---|
| | | (pH 6.0) (OD_{6.0}) | | (pH 7.4) (OD_{7.4}) | | OD_{6.0}/OD_{7.4} | | NO | |
| Chain | Mutation | Dilution 1 | Dilution 2 | Dilution 1 | Dilution 2 | Dilution 1 | Dilution 2 | HC | LC |
| HC | T23K | 2.6495 | 1.048 | 2.125 | 0.619 | 1.25 | 1.695 | 30 | 9 |
| HC | T23H | 2.744 | 1.5525 | 2.3405 | 0.833 | 1.173 | 1.851 | 31 | 9 |
| HC | T23R | 2.5055 | 1.2625 | 2.061 | 0.6245 | 1.216 | 2.03 | 32 | 9 |
| HC | T23A | 2.8735 | 1.142 | 2.5135 | 0.5 | 1.15 | 2.283 | 33 | 9 |
| HC | T23C | 2.654 | 1.3115 | 2.2505 | 0.687 | 1.179 | 1.909 | 34 | 9 |
| HC | T23E | 2.8785 | 1.3525 | 2.678 | 0.667 | 1.075 | 2.028 | 35 | 9 |
| HC | T23G | 1.679 | 0.3445 | 0.9585 | 0.1655 | 1.753 | 2.08 | 36 | 9 |
| HC | T23I | 2.709 | 1.4085 | 2.309 | 0.81 | 1.175 | 1.736 | 37 | 9 |
| HC | T23M | 2.3595 | 0.8185 | 1.772 | 0.504 | 1.332 | 1.636 | 38 | 9 |
| HC | T23N | 2.627 | 1.0915 | 1.823 | 0.6175 | 1.45 | 1.778 | 39 | 9 |
| HC | T23P | 0.252 | 0.1 | 0.1395 | 0.0965 | 1.812 | 1.035 | 40 | 9 |
| HC | T23S | 1.644 | 1.2745 | 1.9785 | 0.692 | 0.832 | 1.841 | 41 | 9 |
| HC | T23V | 0.258 | 0.1445 | 0.1775 | 0.106 | 1.454 | 1.365 | 42 | 9 |
| HC | T23W | 2.346 | 0.8765 | 1.8475 | 0.3025 | 1.274 | 2.896 | 43 | 9 |
| HC | T23L | 2.602 | 0.576 | 1.7855 | 0.2815 | 1.575 | 2.048 | 44 | 9 |
| HC | V24R | 0.091 | 0.085 | 0.079 | 0.071 | 1.158 | 1.194 | 45 | 9 |
| HC | V24A | 3.065 | 1.568 | 2.184 | 0.523 | 1.403 | 3.003 | 46 | 9 |
| HC | V24E | 0.780 | 0.232 | 0.300 | 0.114 | 2.596 | 2.044 | 1063 | 9 |
| HC | V24F | 2.386 | 0.645 | 1.156 | 0.336 | 2.057 | 2.937 | 47 | 9 |
| HC | V24G | 3.144 | 1.932 | 2.687 | 0.716 | 1.170 | 2.701 | 48 | 9 |
| HC | V24I | 1.669 | 0.485 | 0.590 | 0.176 | 2.837 | 2.761 | 49 | 9 |
| HC | V24M | 2.765 | 0.957 | 1.311 | 0.350 | 2.110 | 2.738 | 50 | 9 |
| HC | V24P | 1.512 | 0.388 | 0.511 | 0.165 | 2.961 | 2.355 | 51 | 9 |
| HC | V24S | 3.093 | 1.588 | 2.109 | 0.533 | 1.467 | 2.979 | 52 | 9 |
| HC | V24T | 2.605 | 0.821 | 1.091 | 0.276 | 2.389 | 2.983 | 53 | 9 |
| HC | V24L | 1.678 | 0.538 | 0.431 | 0.146 | 3.889 | 3.695 | 54 | 9 |
| HC | S25H | 3.006 | 1.752 | 1.255 | 0.311 | 2.456 | 5.667 | 55 | 9 |
| HC | S25R | 3.104 | 1.367 | 1.807 | 0.388 | 1.721 | 3.484 | 56 | 9 |
| HC | S25A | 3.206 | 2.225 | 2.164 | 0.563 | 1.481 | 3.957 | 57 | 9 |
| HC | S25C | 2.947 | 1.369 | 1.858 | 0.431 | 1.586 | 3.184 | 58 | 9 |
| HC | S25D | 3.076 | 1.717 | 2.194 | 0.578 | 1.487 | 3.073 | 59 | 9 |
| HC | S25E | 3.099 | 1.210 | 2.658 | 0.663 | 1.166 | 1.827 | 60 | 9 |
| HC | S25F | 3.135 | 1.758 | 2.822 | 0.787 | 1.111 | 2.234 | 61 | 9 |
| HC | S25G | 2.937 | 1.218 | 1.142 | 0.317 | 2.579 | 3.845 | 62 | 9 |
| HC | S25I | 3.042 | 2.171 | 1.994 | 0.494 | 1.525 | 4.394 | 63 | 9 |
| HC | S25M | 3.158 | 2.444 | 2.774 | 0.759 | 1.138 | 3.230 | 64 | 9 |
| HC | S25P | 0.899 | 0.240 | 0.250 | 0.107 | 3.629 | 2.240 | 65 | 9 |
| HC | S25Q | 1.999 | 0.527 | 0.495 | 0.146 | 4.034 | 3.628 | 66 | 9 |
| HC | S25T | 2.795 | 0.510 | 1.483 | 0.162 | 1.886 | 1.567 | 67 | 9 |
| HC | S25V | 3.245 | 2.478 | 2.331 | 0.804 | 1.393 | 3.082 | 68 | 9 |
| HC | S25L | 3.155 | 1.773 | 1.631 | 0.441 | 1.935 | 4.040 | 69 | 9 |
| HC | G26H | 1.7955 | 0.545 | 1.1055 | 0.303 | 1.625 | 0.902 | 70 | 9 |
| HC | G26R | 1.9395 | 0.6055 | 1.444 | 0.338 | 1.342 | 1.793 | 71 | 9 |
| HC | G26D | 2.2105 | 0.7555 | 1.4155 | 0.4275 | 1.56 | 1.77 | 72 | 9 |
| HC | G26F | 0.588 | 0.2175 | 0.323 | 0.1345 | 1.822 | 1.628 | 73 | 9 |
| HC | G26M | 1.32 | 0.4535 | 0.841 | 0.2495 | 1.571 | 1.817 | 74 | 9 |
| HC | G26N | 2.9605 | 1.9525 | 2.99 | 1.2305 | 0.99 | 1.587 | 75 | 9 |
| HC | G26P | 1.001 | 0.4445 | 1.0425 | 0.309 | 0.977 | 1.441 | 76 | 9 |
| HC | G26Q | 2.45 | 0.8875 | 1.9265 | 0.5285 | 1.272 | 1.687 | 77 | 9 |
| HC | G26S | 2.226 | 0.7665 | 1.883 | 0.463 | 1.185 | 1.673 | 78 | 9 |
| HC | G26Y | 1.4695 | 0.447 | 0.8715 | 0.252 | 1.686 | 1.772 | 79 | 9 |
| HC | G26L | 1.015 | 0.312 | 0.64 | 0.2245 | 1.586 | 1.395 | 80 | 9 |
| HC | F27H | 1.488 | 0.342 | 0.817 | 0.243 | 1.823 | 1.418 | 81 | 9 |
| HC | F27R | 1.367 | 0.861 | 0.774 | 0.239 | 1.767 | 3.628 | 82 | 9 |
| HC | F27A | 2.936 | 2.213 | 2.241 | 0.769 | 1.310 | 2.880 | 83 | 9 |
| HC | F27D | 3.061 | 1.792 | 2.674 | 1.026 | 1.147 | 1.754 | 84 | 9 |
| HC | F27E | 2.792 | 1.306 | 2.418 | 0.910 | 1.155 | 1.435 | 85 | 9 |
| HC | F27G | 2.644 | 2.445 | 1.733 | 0.536 | 1.536 | 4.766 | 86 | 9 |
| HC | F27M | 2.935 | 1.233 | 1.980 | 0.405 | 1.483 | 3.047 | 87 | 9 |
| HC | F27P | 2.711 | 0.953 | 1.603 | 0.501 | 1.720 | 1.990 | 88 | 9 |
| HC | F27Q | 2.207 | 1.265 | 1.554 | 0.439 | 1.420 | 2.880 | 89 | 9 |
| HC | F27S | 1.898 | 0.508 | 0.918 | 0.253 | 2.067 | 2.014 | 90 | 9 |
| HC | F27T | 2.836 | 1.241 | 1.875 | 0.531 | 1.513 | 2.341 | 91 | 9 |
| HC | F27V | 1.419 | 0.712 | 0.614 | 0.190 | 2.311 | 3.752 | 92 | 9 |
| HC | F27W | 1.270 | 0.319 | 0.577 | 0.176 | 2.204 | 1.816 | 93 | 9 |
| HC | F27Y | 2.187 | 0.711 | 1.017 | 0.245 | 2.217 | 2.908 | 94 | 9 |
| HC | F27L | 2.492 | 0.784 | 1.562 | 0.478 | 1.595 | 1.639 | 95 | 9 |
| HC | S28K | 3.1285 | 2.125 | 2.927 | 1.176 | 1.069 | 1.804 | 96 | 9 |
| HC | S28H | 2.1735 | 0.7705 | 1.4715 | 0.4045 | 1.481 | 1.918 | 97 | 9 |
| HC | S28R | 2.9975 | 1.3625 | 2.5995 | 0.8495 | 1.153 | 1.604 | 98 | 9 |
| HC | S28A | 2.148 | 0.8335 | 1.468 | 0.3875 | 1.464 | 2.158 | 99 | 9 |
| HC | S28D | 1.97 | 0.7175 | 1.1875 | 0.3805 | 1.663 | 1.89 | 100 | 9 |
| HC | S28I | 2.8715 | 1.3185 | 2.2545 | 0.6505 | 1.273 | 2.022 | 101 | 9 |
| HC | S28M | 2.635 | 0.984 | 1.911 | 0.574 | 1.38 | 1.718 | 102 | 9 |
| HC | S28P | 2.6535 | 1.132 | 1.94 | 0.606 | 1.371 | 1.868 | 103 | 9 |
| HC | S28Q | 2.98 | 1.4105 | 2.4315 | 0.775 | 1.229 | 1.823 | 104 | 9 |
| HC | S28V | 3.1155 | 1.6905 | 2.79 | 1.0175 | 1.12 | 1.675 | 105 | 9 |
| HC | S28W | 3.1335 | 1.685 | 2.628 | 0.909 | 1.193 | 1.855 | 106 | 9 |
| HC | S28L | 2.4775 | 1.9575 | 1.863 | 0.563 | 1.331 | 3.481 | 107 | 9 |
| HC | L29K | 1.476 | 0.837 | 0.747 | 0.371 | 1.976 | 2.418 | 108 | 9 |
| HC | L29H | 1.329 | 0.717 | 0.661 | 0.264 | 2.020 | 2.714 | 109 | 9 |
| HC | L29A | 1.626 | 0.643 | 1.109 | 0.344 | 1.473 | 2.080 | 110 | 9 |
| HC | L29D | 0.504 | 0.232 | 0.329 | 0.164 | 1.531 | 1.409 | 111 | 9 |
| HC | L29G | 0.728 | 0.198 | 0.464 | 0.163 | 1.567 | 1.224 | 112 | 9 |
| HC | L29I | 2.250 | 1.661 | 2.020 | 0.893 | 1.121 | 1.864 | 113 | 9 |
| HC | L29M | 2.220 | 1.031 | 1.836 | 0.637 | 1.214 | 1.619 | 114 | 9 |
| HC | L29N | 0.352 | 0.326 | 0.253 | 0.149 | 1.390 | 1.254 | 115 | 9 |
| HC | L29S | 0.916 | 0.414 | 0.470 | 0.206 | 1.952 | 2.038 | 116 | 9 |
| HC | L29V | 0.975 | 0.516 | 0.543 | 0.287 | 1.796 | 1.800 | 117 | 9 |
| HC | T30H | 1.483 | 0.576 | 1.123 | 0.290 | 1.326 | 1.999 | 118 | 9 |
| HC | T30R | 1.646 | 0.808 | 1.487 | 0.412 | 1.110 | 1.961 | 119 | 9 |
| HC | T30D | 1.445 | 0.582 | 1.043 | 0.295 | 1.387 | 1.974 | 120 | 9 |
| HC | T30G | 1.130 | 0.455 | 0.925 | 0.257 | 1.222 | 1.776 | 121 | 9 |
| HC | T30I | 1.407 | 0.801 | 1.108 | 0.308 | 1.280 | 1.433 | 122 | 9 |
| HC | T30M | 1.241 | 0.454 | 1.054 | 0.221 | 1.191 | 2.061 | 123 | 9 |
| HC | T30N | 1.471 | 0.530 | 1.126 | 0.270 | 1.306 | 1.956 | 124 | 9 |
| HC | T30P | 1.341 | 0.405 | 0.936 | 0.263 | 1.432 | 1.544 | 125 | 9 |
| HC | T30S | 1.225 | 0.510 | 1.080 | 0.287 | 1.134 | 1.785 | 126 | 9 |
| HC | T30V | 1.210 | 0.521 | 1.130 | 0.246 | 1.074 | 2.113 | 127 | 9 |
| HC | T30W | 1.393 | 0.528 | 0.960 | 0.242 | 1.451 | 2.183 | 128 | 9 |
| HC | T30Y | 1.121 | 0.534 | 0.941 | 0.369 | 1.193 | 1.432 | 129 | 9 |
| HC | N31K | 3.216 | 2.270 | 2.256 | 0.713 | 1.433 | 3.242 | 130 | 9 |
| HC | N31H | 3.153 | 2.116 | 1.952 | 0.544 | 1.656 | 3.922 | 131 | 9 |
| HC | N31D | 2.946 | 1.227 | 1.746 | 0.424 | 1.687 | 2.891 | 132 | 9 |
| HC | N31E | 3.210 | 2.909 | 2.668 | 1.594 | 1.233 | 1.914 | 133 | 9 |
| HC | N31G | 3.218 | 1.917 | 2.566 | 0.760 | 1.254 | 2.529 | 134 | 9 |
| HC | N31I | 2.651 | 0.860 | 0.921 | 0.241 | 2.881 | 3.567 | 135 | 9 |
| HC | N31T | 3.102 | 0.773 | 2.226 | 0.567 | 1.394 | 1.364 | 136 | 9 |
| HC | N31V | 2.724 | 1.003 | 1.105 | 0.137 | 2.466 | 3.747 | 137 | 9 |
| HC | N31L | 2.920 | 0.983 | 1.990 | 0.575 | 1.467 | 1.713 | 138 | 9 |
| HC | Y32H | 1.011 | 0.488 | 0.684 | 0.248 | 1.483 | 1.963 | 139 | 9 |
| HC | Y32R | 1.253 | 0.454 | 1.049 | 0.280 | 1.194 | 1.616 | 140 | 9 |
| HC | Y32C | 0.667 | 0.256 | 0.405 | 0.182 | 1.645 | 1.408 | 141 | 9 |
| HC | Y32M | 1.035 | 0.368 | 0.756 | 0.237 | 1.366 | 1.556 | 142 | 9 |
| HC | Y32N | 0.837 | 0.447 | 0.524 | 0.121 | 1.604 | 1.707 | 143 | 9 |
| HC | Y32T | 0.705 | 0.296 | 0.435 | 0.176 | 1.624 | 1.685 | 144 | 9 |
| HC | Y32V | 0.767 | 0.216 | 0.518 | 0.223 | 1.484 | 0.967 | 145 | 9 |
| HC | Y32L | 0.793 | 0.299 | 0.550 | 0.169 | 1.443 | 1.787 | 146 | 9 |
| HC | G33E | 3.048 | 1.162 | 2.323 | 0.474 | 1.349 | 2.617 | 147 | 9 |
| HC | G33M | 2.472 | 0.669 | 1.904 | 0.537 | 1.305 | 1.246 | 148 | 9 |
| HC | G33S | 3.245 | 2.463 | 3.160 | 1.936 | 1.027 | 1.303 | 149 | 9 |
| HC | G33T | 2.346 | 0.748 | 1.959 | 0.714 | 1.226 | 1.038 | 150 | 9 |
| HC | G33Y | 0.121 | 0.106 | 0.123 | 0.097 | 0.982 | 1.095 | 151 | 9 |
| HC | V34A | 0.566 | 0.197 | 0.280 | 0.102 | 2.024 | 1.928 | 152 | 9 |
| HC | V34C | 0.756 | 0.432 | 0.798 | 0.164 | 0.950 | 2.625 | 153 | 9 |
| HC | V34I | 1.803 | 0.772 | 1.352 | 0.391 | 1.334 | 1.971 | 154 | 9 |
| HC | V34M | 1.219 | 0.681 | 0.925 | 0.331 | 1.320 | 2.069 | 155 | 9 |
| HC | V34P | 0.064 | 0.058 | 0.060 | 0.026 | 1.074 | 1.116 | 156 | 9 |
| HC | V34L | 1.105 | 0.429 | 0.772 | 0.206 | 1.434 | 2.118 | 157 | 9 |
| HC | H35I | 0.069 | 0.457 | 0.055 | 0.056 | 1.260 | 1.024 | 158 | 9 |
| HC | H35Q | 0.895 | 0.219 | 0.450 | 0.155 | 1.996 | 1.409 | 159 | 9 |
| HC | W36K | 0.062 | 0.056 | 0.056 | 0.028 | 1.111 | 1.002 | 160 | 9 |
| HC | W36A | 0.532 | 0.150 | 0.274 | 0.104 | 1.944 | 1.453 | 161 | 9 |
| HC | W36I | 1.421 | 0.791 | 1.241 | 0.495 | 1.148 | 1.600 | 162 | 9 |
| HC | W36V | 1.501 | 0.790 | 1.364 | 0.480 | 1.099 | 1.647 | 163 | 9 |
| HC | W36Y | 1.189 | 0.456 | 0.887 | 0.277 | 1.340 | 1.648 | 164 | 9 |
| HC | V50K | 0.105 | 0.118 | 0.101 | 0.101 | 1.040 | 1.170 | 165 | 9 |
| HC | V50H | 2.570 | 0.974 | 2.352 | 0.727 | 1.095 | 1.340 | 166 | 9 |
| HC | V50A | 3.196 | 1.613 | 2.597 | 1.019 | 1.233 | 1.582 | 167 | 9 |
| HC | V50D | 0.626 | 0.212 | 0.406 | 0.149 | 1.543 | 1.434 | 168 | 9 |
| HC | V50E | 0.400 | 0.146 | 0.339 | 0.134 | 1.181 | 1.086 | 169 | 9 |
| HC | V50G | 2.847 | 1.118 | 2.232 | 0.841 | 1.277 | 1.333 | 170 | 9 |
| HC | V50I | 1.551 | 0.414 | 0.555 | 0.182 | 2.795 | 2.298 | 171 | 9 |
| HC | V50N | 1.816 | 0.522 | 0.804 | 0.239 | 2.268 | 2.188 | 172 | 9 |
| HC | V50Q | 2.843 | 1.043 | 1.913 | 0.503 | 1.487 | 2.079 | 173 | 9 |
| HC | V50T | 3.264 | 2.695 | 3.246 | 2.339 | 1.005 | 1.153 | 174 | 9 |
| HC | V50L | 0.695 | 0.232 | 0.298 | 0.064 | 2.387 | 1.833 | 175 | 9 |
| HC | I51K | 1.861 | 0.635 | 1.068 | 0.288 | 1.764 | 2.207 | 176 | 9 |
| HC | I51H | 2.446 | 1.912 | 1.183 | 0.304 | 2.070 | 2.334 | 177 | 9 |
| HC | I51A | 3.027 | 1.178 | 1.436 | 0.346 | 2.378 | 3.590 | 178 | 9 |
| HC | I51C | 2.501 | 0.848 | 1.306 | 0.307 | 1.916 | 2.774 | 179 | 9 |
| HC | I51E | 0.879 | 0.283 | 0.491 | 0.184 | 1.791 | 1.537 | 180 | 9 |
| HC | I51G | 1.017 | 0.313 | 0.347 | 0.143 | 2.925 | 2.186 | 181 | 9 |
| HC | I51N | 2.508 | 0.797 | 1.240 | 0.302 | 2.026 | 2.641 | 182 | 9 |
| HC | I51Q | 3.286 | 1.967 | 2.878 | 0.877 | 1.142 | 2.255 | 183 | 9 |
| HC | I51S | 3.087 | 1.406 | 2.276 | 0.582 | 1.357 | 2.418 | 184 | 9 |
| HC | I51V | 3.312 | 2.820 | 3.310 | 1.602 | 1.001 | 1.761 | 185 | 9 |
| HC | I51Y | 0.997 | 0.301 | 0.626 | 0.203 | 1.592 | 1.477 | 186 | 9 |
| HC | I51L | 3.286 | 2.289 | 3.038 | 0.951 | 1.082 | 2.408 | 187 | 9 |
| HC | W52I | 0.855 | 0.249 | 0.392 | 0.148 | 2.183 | 1.690 | 188 | 9 |
| HC | W52N | 2.980 | 1.888 | 2.290 | 0.917 | 1.307 | 2.061 | 189 | 9 |
| HC | W52Y | 2.989 | 2.413 | 2.187 | 0.883 | 1.369 | 2.092 | 190 | 9 |
| HC | S53H | 3.290 | 2.779 | 3.202 | 1.848 | 1.027 | 1.504 | 191 | 9 |
| HC | S53R | 1.585 | 0.458 | 1.356 | 0.346 | 1.372 | 1.658 | 192 | 9 |
| HC | S53A | 3.441 | 3.325 | 3.360 | 2.616 | 1.024 | 1.299 | 193 | 9 |
| HC | S53C | 3.202 | 1.915 | 3.321 | 1.734 | 0.964 | 1.069 | 194 | 9 |
| HC | S53G | 3.389 | 3.289 | 3.381 | 2.854 | 1.002 | 1.153 | 195 | 9 |
| HC | S53I | 3.311 | 2.974 | 3.261 | 2.174 | 1.016 | 1.370 | 196 | 9 |
| HC | S53M | 3.210 | 1.689 | 3.018 | 1.025 | 1.068 | 1.659 | 197 | 9 |
| HC | S53P | 3.229 | 2.414 | 3.160 | 1.676 | 1.022 | 1.444 | 198 | 9 |
| HC | S53Q | 2.856 | 1.126 | 1.921 | 0.400 | 1.624 | 3.485 | 199 | 9 |
| HC | S53L | 3.298 | 2.391 | 3.295 | 1.757 | 1.001 | 1.472 | 200 | 9 |
| HC | S53T | 3.272 | 2.617 | 3.473 | 1.037 | 0.948 | 2.643 | 201 | 9 |
| HC | S53V | 3.315 | 2.305 | 3.321 | 1.652 | 0.998 | 1.406 | 202 | 9 |
| HC | S53Y | 3.377 | 2.797 | 3.235 | 1.999 | 1.044 | 1.398 | 203 | 9 |
| HC | G54H | 2.800 | 1.241 | 2.238 | 0.855 | 1.251 | 1.454 | 204 | 9 |
| HC | G54R | 2.341 | 0.748 | 1.702 | 0.518 | 1.376 | 1.446 | 205 | 9 |
| HC | G54A | 3.253 | 1.980 | 2.792 | 1.083 | 1.172 | 2.214 | 206 | 9 |
| HC | G54C | 1.636 | 0.346 | 1.055 | 0.238 | 1.551 | 1.452 | 207 | 9 |
| HC | G54D | 2.758 | 1.191 | 1.987 | 0.553 | 1.390 | 2.156 | 208 | 9 |
| HC | G54P | 2.336 | 0.773 | 1.320 | 0.370 | 1.772 | 2.089 | 209 | 9 |
| HC | G54S | 0.769 | 0.217 | 0.389 | 0.136 | 2.004 | 1.609 | 210 | 9 |
| HC | G55H | 3.289 | 1.916 | 2.919 | 0.957 | 1.132 | 2.085 | 211 | 9 |
| HC | G55R | 3.195 | 2.738 | 3.099 | 1.332 | 1.031 | 1.355 | 212 | 9 |
| HC | G55M | 3.076 | 1.452 | 2.727 | 0.766 | 1.131 | 1.889 | 213 | 9 |
| HC | G55S | 3.007 | 1.282 | 2.530 | 0.579 | 1.189 | 2.225 | 214 | 9 |
| HC | G55Y | 1.350 | 0.339 | 0.707 | 0.204 | 1.923 | 1.666 | 215 | 9 |
| HC | N56K | 2.941 | 1.283 | 2.775 | 1.030 | 1.059 | 1.246 | 216 | 9 |
| HC | N56A | 3.111 | 1.131 | 1.799 | 0.374 | 1.730 | 3.022 | 217 | 9 |
| HC | N56P | 1.322 | 1.332 | 0.880 | 0.235 | 1.525 | 1.408 | 218 | 9 |
| HC | N56S | 3.288 | 1.415 | 2.511 | 0.693 | 1.311 | 2.044 | 219 | 9 |
| HC | N56V | 3.021 | 1.201 | 2.660 | 0.867 | 1.136 | 1.385 | 220 | 9 |
| HC | N56G | 2.992 | 0.991 | 1.578 | 0.390 | 1.897 | 2.545 | 221 | 9 |
| HC | T57H | 3.064 | 1.040 | 1.792 | 0.457 | 1.711 | 2.276 | 222 | 9 |
| HC | T57R | 3.367 | 2.070 | 3.090 | 1.247 | 1.090 | 1.661 | 223 | 9 |
| HC | T57L | 3.316 | 1.923 | 2.903 | 1.052 | 1.143 | 1.827 | 224 | 9 |
| HC | T57A | 3.376 | 2.238 | 2.975 | 1.110 | 1.135 | 2.020 | 225 | 9 |
| HC | T57C | 3.287 | 1.693 | 2.703 | 0.814 | 1.216 | 2.088 | 226 | 9 |
| HC | T57D | 1.860 | 0.440 | 0.804 | 0.203 | 2.318 | 2.167 | 227 | 9 |
| HC | T57F | 3.414 | 2.680 | 3.125 | 1.839 | 1.093 | 1.458 | 228 | 9 |
| HC | T57M | 3.349 | 1.930 | 2.975 | 0.531 | 1.127 | 1.840 | 229 | 9 |
| HC | T57N | 3.125 | 1.170 | 2.145 | 0.537 | 1.459 | 2.182 | 230 | 9 |
| HC | T57Q | 3.359 | 1.699 | 2.774 | 0.792 | 1.211 | 2.147 | 231 | 9 |
| HC | T57W | 3.311 | 1.776 | 2.772 | 0.725 | 1.195 | 2.452 | 232 | 9 |
| HC | T57Y | 3.456 | 2.210 | 3.124 | 1.459 | 1.106 | 1.515 | 233 | 9 |
| HC | D58L | 1.607 | 0.742 | 2.044 | 0.579 | 0.786 | 1.314 | 234 | 9 |
| HC | D58G | 3.291 | 1.793 | 2.723 | 0.965 | 1.209 | 1.862 | 235 | 9 |
| HC | D58M | 2.134 | 0.790 | 1.507 | 0.545 | 1.451 | 1.449 | 236 | 9 |
| HC | D58N | 3.266 | 2.134 | 2.887 | 1.412 | 1.132 | 1.325 | 237 | 9 |
| HC | D58Q | 1.683 | 0.481 | 0.844 | 0.256 | 2.005 | 1.878 | 238 | 9 |
| HC | Y59H | 1.692 | 0.571 | 1.066 | 0.251 | 1.610 | 2.246 | 239 | 9 |
| HC | Y59R | 2.971 | 1.756 | 2.709 | 0.914 | 1.097 | 2.003 | 240 | 9 |
| HC | Y59A | 1.621 | 0.399 | 0.699 | 0.186 | 2.832 | 2.149 | 241 | 9 |
| HC | Y59C | 2.628 | 0.883 | 1.790 | 0.421 | 1.579 | 2.078 | 242 | 9 |
| HC | Y59D | 1.032 | 0.272 | 0.353 | 0.145 | 2.967 | 1.863 | 243 | 9 |
| HC | Y59E | 2.457 | 0.801 | 1.227 | 0.164 | 2.016 | 2.581 | 244 | 9 |
| HC | Y59G | 2.663 | 1.600 | 2.376 | 0.842 | 1.116 | 1.900 | 245 | 9 |
| HC | Y59I | 2.962 | 1.866 | 2.199 | 0.996 | 1.483 | 1.922 | 246 | 9 |
| HC | Y59P | 0.575 | 0.187 | 0.183 | 0.132 | 3.219 | 1.417 | 247 | 9 |
| HC | Y59Q | 2.915 | 1.383 | 2.283 | 0.557 | 1.277 | 2.480 | 248 | 9 |
| HC | Y59S | 2.891 | 1.523 | 2.571 | 0.732 | 1.128 | 2.070 | 249 | 9 |
| HC | Y59T | 3.059 | 1.678 | 2.585 | 0.702 | 1.184 | 2.510 | 250 | 9 |
| HC | Y59V | 2.561 | 0.945 | 1.685 | 0.417 | 1.743 | 2.247 | 251 | 9 |
| HC | Y59W | 2.886 | 1.247 | 2.089 | 0.496 | 1.382 | 2.708 | 252 | 9 |
| HC | N60K | 3.012 | 1.697 | 2.313 | 0.893 | 1.306 | 1.902 | 253 | 9 |
| HC | N60A | 3.104 | 1.847 | 2.729 | 0.958 | 1.140 | 1.935 | 254 | 9 |
| HC | N60C | 2.070 | 0.596 | 1.170 | 0.299 | 1.824 | 1.999 | 255 | 9 |
| HC | N60D | 0.196 | 0.800 | 0.113 | 0.089 | 1.736 | 1.142 | 256 | 9 |
| HC | N60F | 2.386 | 0.935 | 1.355 | 0.398 | 2.039 | 2.370 | 257 | 9 |
| HC | N60G | 2.647 | 0.944 | 1.537 | 0.407 | 1.831 | 2.323 | 258 | 9 |
| HC | N60P | 1.097 | 0.342 | 0.419 | 0.171 | 2.634 | 2.003 | 259 | 9 |
| HC | N60Q | 1.676 | 0.484 | 0.889 | 0.262 | 1.946 | 1.854 | 260 | 9 |
| HC | N60S | 2.148 | 0.696 | 1.104 | 0.299 | 1.953 | 2.362 | 261 | 9 |
| HC | N60T | 2.755 | 1.083 | 1.910 | 0.520 | 1.490 | 2.093 | 262 | 9 |
| HC | N60Y | 2.844 | 1.291 | 2.407 | 0.676 | 1.197 | 1.921 | 263 | 9 |
| HC | T61N | 3.043 | 1.882 | 2.603 | 0.936 | 1.176 | 2.012 | 264 | 9 |
| HC | T61Q | 2.187 | 0.731 | 1.372 | 0.188 | 1.591 | 1.974 | 265 | 9 |
| HC | P62G | 2.593 | 1.009 | 1.765 | 0.508 | 1.469 | 1.985 | 266 | 9 |
| HC | F63H | 3.170 | 2.002 | 2.715 | 0.773 | 1.168 | 2.592 | 267 | 9 |
| HC | F63R | 2.377 | 0.681 | 0.957 | 0.259 | 2.485 | 2.636 | 268 | 9 |
| HC | F63L | 3.150 | 1.606 | 2.218 | 0.627 | 1.421 | 2.560 | 269 | 9 |
| HC | F63A | 2.387 | 0.746 | 1.016 | 0.263 | 2.349 | 2.841 | 270 | 9 |
| HC | F63C | 0.911 | 0.242 | 0.272 | 0.112 | 3.440 | 2.160 | 271 | 9 |
| HC | F63D | 2.984 | 1.277 | 1.839 | 0.456 | 1.629 | 2.806 | 272 | 9 |
| HC | F63G | 2.914 | 1.094 | 1.516 | 0.401 | 1.951 | 2.767 | 273 | 9 |
| HC | F63M | 3.073 | 1.526 | 2.122 | 0.449 | 1.448 | 3.401 | 274 | 9 |
| HC | F63N | 2.284 | 0.672 | 1.240 | 0.156 | 1.843 | 2.201 | 275 | 9 |
| HC | F63Q | 2.906 | 1.180 | 1.622 | 0.373 | 1.794 | 3.164 | 276 | 9 |
| HC | F63S | 2.894 | 1.014 | 1.511 | 0.162 | 1.917 | 6.301 | 277 | 9 |
| HC | F63V | 3.032 | 1.585 | 2.090 | 0.477 | 1.451 | 3.338 | 278 | 9 |
| HC | T64R | 3.052 | 1.908 | 2.925 | 0.933 | 1.044 | 2.051 | 279 | 9 |
| HC | T64L | 3.052 | 2.189 | 2.814 | 1.108 | 1.093 | 1.976 | 280 | 9 |
| HC | T64C | 2.770 | 1.082 | 2.220 | 0.589 | 1.250 | 1.839 | 281 | 9 |
| HC | T64F | 0.165 | 0.087 | 0.084 | 0.089 | 1.974 | 0.985 | 282 | 9 |
| HC | T64G | 3.088 | 1.925 | 3.011 | 0.955 | 1.026 | 2.018 | 283 | 9 |
| HC | T64N | 0.232 | 0.132 | 0.092 | 0.087 | 2.550 | 1.516 | 284 | 9 |
| HC | T64Q | 1.555 | 0.542 | 0.952 | 0.253 | 1.641 | 2.150 | 285 | 9 |
| HC | T64V | 2.784 | 1.255 | 2.046 | 0.261 | 1.362 | 2.224 | 286 | 9 |
| HC | S65H | 3.222 | 2.639 | 3.201 | 1.556 | 1.007 | 1.704 | 287 | 9 |
| HC | S65R | 3.199 | 2.297 | 3.080 | 1.033 | 1.041 | 2.226 | 288 | 9 |
| HC | S65L | 3.302 | 2.824 | 3.272 | 1.846 | 1.009 | 1.530 | 289 | 9 |
| HC | S65C | 3.233 | 2.804 | 2.969 | 1.317 | 1.090 | 1.761 | 290 | 9 |
| HC | S65E | 3.256 | 2.320 | 3.089 | 1.304 | 1.054 | 1.779 | 291 | 9 |
| HC | S65F | 3.231 | 2.362 | 3.025 | 1.420 | 1.068 | 1.664 | 292 | 9 |
| HC | S65G | 3.337 | 2.992 | 3.335 | 2.388 | 1.000 | 1.253 | 293 | 9 |
| HC | S65I | 3.220 | 2.108 | 2.996 | 1.180 | 1.075 | 1.788 | 294 | 9 |
| HC | S65M | 3.102 | 1.898 | 2.758 | 0.940 | 1.125 | 2.018 | 295 | 9 |
| HC | S65N | 3.224 | 2.277 | 2.919 | 1.060 | 1.106 | 2.151 | 296 | 9 |
| HC | S65P | 2.795 | 1.197 | 1.892 | 0.466 | 1.479 | 2.568 | 297 | 9 |
| HC | S65Q | 3.193 | 2.250 | 2.951 | 1.100 | 1.082 | 2.055 | 298 | 9 |
| HC | S65T | 3.191 | 1.802 | 2.779 | 0.915 | 1.149 | 1.972 | 299 | 9 |
| HC | S65W | 3.227 | 2.510 | 3.114 | 1.514 | 1.037 | 1.662 | 300 | 9 |
| HC | S65Y | 3.322 | 2.816 | 3.201 | 1.928 | 1.038 | 1.462 | 301 | 9 |
| HC | R66L | 3.149 | 1.674 | 2.785 | 0.636 | 1.131 | 2.636 | 302 | 9 |
| HC | R66A | 2.441 | 1.026 | 2.008 | 0.491 | 1.217 | 2.091 | 303 | 9 |
| HC | R66C | 2.036 | 0.645 | 1.022 | 0.281 | 1.992 | 2.298 | 304 | 9 |
| HC | R66E | 1.775 | 0.595 | 1.089 | 0.316 | 1.627 | 1.889 | 305 | 9 |
| HC | R66F | 2.462 | 0.416 | 1.195 | 0.259 | 2.070 | 1.603 | 306 | 9 |
| HC | R66N | 3.065 | 1.089 | 2.343 | 0.658 | 1.308 | 1.655 | 307 | 9 |
| HC | R66P | 0.469 | 0.169 | 0.306 | 0.123 | 1.537 | 1.378 | 308 | 9 |
| HC | R66Q | 3.010 | 1.421 | 2.386 | 0.712 | 1.261 | 1.999 | 309 | 9 |
| HC | R66S | 2.805 | 0.994 | 1.945 | 0.414 | 1.444 | 2.404 | 310 | 9 |
| HC | R66T | 0.612 | 0.200 | 0.326 | 0.123 | 1.879 | 1.628 | 311 | 9 |
| HC | R66V | 3.198 | 1.703 | 3.077 | 0.525 | 1.039 | 1.530 | 312 | 9 |
| HC | R66G | 2.234 | 0.565 | 0.977 | 0.247 | 2.291 | 2.292 | 313 | 9 |
| HC | L67A | 2.784 | 1.152 | 1.921 | 0.487 | 1.449 | 2.377 | 314 | 9 |
| HC | L67C | 3.189 | 1.868 | 2.640 | 0.675 | 1.208 | 2.768 | 315 | 9 |
| HC | L67D | 0.113 | 0.086 | 0.085 | 0.079 | 1.343 | 1.078 | 316 | 9 |
| HC | L67E | 2.953 | 1.155 | 2.003 | 0.552 | 1.475 | 2.151 | 317 | 9 |
| HC | L67I | 2.974 | 1.183 | 1.920 | 0.461 | 1.548 | 2.579 | 318 | 9 |
| HC | L67M | 2.889 | 1.300 | 2.100 | 0.558 | 1.376 | 2.345 | 319 | 9 |
| HC | L67Q | 2.297 | 0.634 | 1.116 | 0.297 | 2.057 | 2.151 | 320 | 9 |
| HC | L67S | 3.114 | 1.560 | 2.496 | 0.646 | 1.248 | 2.418 | 321 | 9 |
| HC | L67T | 2.929 | 1.127 | 1.712 | 0.393 | 1.713 | 2.871 | 322 | 9 |
| HC | L67V | 2.755 | 0.875 | 1.330 | 0.346 | 2.072 | 2.529 | 323 | 9 |
| HC | L67Y | 3.171 | 1.933 | 2.840 | 0.454 | 1.117 | 2.152 | 324 | 9 |
| HC | S68K | 3.274 | 2.096 | 2.959 | 1.092 | 1.109 | 1.920 | 325 | 9 |
| HC | S68H | 3.269 | 2.602 | 3.284 | 1.358 | 0.995 | 1.918 | 326 | 9 |
| HC | S68R | 3.146 | 2.252 | 2.931 | 1.108 | 1.074 | 2.033 | 327 | 9 |
| HC | S68L | 3.054 | 1.591 | 2.441 | 0.645 | 1.251 | 2.471 | 328 | 9 |
| HC | S68C | 3.161 | 2.327 | 3.050 | 1.209 | 1.037 | 1.924 | 329 | 9 |
| HC | S68D | 3.228 | 1.835 | 2.822 | 0.413 | 1.144 | 2.303 | 330 | 9 |
| HC | S68E | 3.123 | 2.025 | 2.841 | 0.965 | 1.100 | 2.104 | 331 | 9 |
| HC | S68F | 0.256 | 0.128 | 0.137 | 0.093 | 1.863 | 1.379 | 332 | 9 |
| HC | S68G | 2.935 | 1.566 | 2.300 | 0.778 | 1.278 | 2.013 | 333 | 9 |
| HC | S68I | 3.209 | 1.895 | 2.834 | 0.788 | 1.132 | 2.404 | 334 | 9 |
| HC | S68N | 3.114 | 1.621 | 2.721 | 0.762 | 1.145 | 2.132 | 335 | 9 |
| HC | S68Q | 3.222 | 2.075 | 3.033 | 1.071 | 1.064 | 1.938 | 336 | 9 |
| HC | S68T | 3.310 | 2.716 | 3.261 | 1.779 | 1.015 | 1.532 | 337 | 9 |
| HC | S68V | 3.099 | 1.701 | 2.661 | 0.761 | 1.165 | 2.237 | 338 | 9 |
| HC | I69A | 0.429 | 0.133 | 0.242 | 0.086 | 1.773 | 1.542 | 339 | 9 |
| HC | I69C | 1.045 | 0.317 | 0.810 | 0.186 | 1.291 | 1.705 | 340 | 9 |
| HC | I69G | 0.112 | 0.133 | 0.085 | 0.062 | 1.312 | 1.147 | 341 | 9 |
| HC | I69Y | 0.523 | 0.157 | 0.340 | 0.132 | 1.538 | 1.194 | 342 | 9 |
| HC | N70H | 3.459 | 1.652 | 2.155 | 0.741 | 1.736 | 2.229 | 343 | 9 |
| HC | N70R | 1.720 | 0.369 | 0.689 | 0.206 | 2.997 | 1.792 | 344 | 9 |
| HC | N70L | 3.184 | 1.401 | 2.232 | 0.608 | 1.429 | 2.305 | 345 | 9 |
| HC | N70D | 1.788 | 0.523 | 0.817 | 0.257 | 2.242 | 2.036 | 346 | 9 |
| HC | N70E | 3.223 | 1.695 | 2.394 | 0.721 | 1.373 | 2.350 | 347 | 9 |
| HC | N70F | 3.263 | 2.109 | 2.985 | 1.368 | 1.095 | 1.557 | 348 | 9 |
| HC | N70G | 2.992 | 1.363 | 2.359 | 0.675 | 1.268 | 2.021 | 349 | 9 |
| HC | N70I | 3.240 | 1.310 | 1.934 | 0.575 | 1.862 | 2.278 | 350 | 9 |
| HC | N70P | 0.192 | 0.445 | 0.375 | 0.235 | 0.502 | 2.019 | 351 | 9 |
| HC | N70Q | 3.194 | 1.500 | 2.347 | 0.854 | 1.364 | 1.765 | 352 | 9 |
| HC | N70S | 3.247 | 2.088 | 2.937 | 0.496 | 1.105 | 2.094 | 353 | 9 |
| HC | N70T | 3.207 | 1.679 | 2.488 | 0.747 | 1.289 | 2.248 | 354 | 9 |
| HC | N70V | 0.241 | 2.063 | 2.833 | 1.232 | 0.085 | 1.677 | 355 | 9 |
| HC | N70Y | 3.152 | 1.553 | 2.029 | 0.788 | 1.888 | 1.980 | 356 | 9 |
| HC | K71H | 3.096 | 1.235 | 2.366 | 0.657 | 1.309 | 1.883 | 357 | 9 |
| HC | K71R | 2.741 | 0.871 | 1.745 | 0.462 | 1.571 | 1.888 | 358 | 9 |
| HC | K71L | 3.205 | 1.828 | 2.883 | 1.290 | 1.112 | 1.422 | 359 | 9 |
| HC | K71A | 1.772 | 0.457 | 1.075 | 0.320 | 1.649 | 1.430 | 360 | 9 |
| HC | K71C | 3.353 | 1.977 | 2.687 | 1.093 | 1.248 | 1.891 | 361 | 9 |
| HC | K71F | 3.342 | 1.506 | 3.119 | 1.260 | 1.072 | 1.195 | 362 | 9 |
| HC | K71G | 2.921 | 0.979 | 2.094 | 0.536 | 1.402 | 1.827 | 363 | 9 |
| HC | K71Q | 3.049 | 1.267 | 2.617 | 1.082 | 1.165 | 1.179 | 364 | 9 |
| HC | K71S | 3.114 | 1.168 | 2.534 | 0.688 | 1.237 | 1.716 | 365 | 9 |
| HC | K71T | 2.533 | 0.830 | 1.688 | 0.299 | 1.500 | 1.544 | 366 | 9 |
| HC | K71V | 3.160 | 1.663 | 2.787 | 0.929 | 1.134 | 1.790 | 367 | 9 |
| HC | K71W | 3.294 | 1.708 | 3.017 | 1.261 | 1.092 | 1.356 | 368 | 9 |
| HC | K71Y | 3.334 | 2.035 | 2.898 | 1.410 | 1.150 | 1.443 | 369 | 9 |
| HC | D72K | 3.108 | 1.388 | 2.427 | 1.747 | 1.281 | 0.795 | 370 | 9 |
| HC | D72H | 3.203 | 1.653 | 2.744 | 0.711 | 1.179 | 2.325 | 371 | 9 |
| HC | D72R | 3.355 | 2.011 | 3.182 | 0.938 | 1.055 | 2.144 | 372 | 9 |
| HC | D72L | 3.252 | 2.402 | 1.511 | 0.561 | 2.153 | 4.308 | 373 | 9 |
| HC | D72A | 2.976 | 1.272 | 3.026 | 1.109 | 0.982 | 1.415 | 374 | 9 |
| HC | D72G | 2.694 | 0.972 | 1.583 | 0.429 | 1.711 | 2.272 | 375 | 9 |
| HC | D72I | 3.200 | 1.798 | 2.711 | 0.827 | 1.182 | 2.179 | 376 | 9 |
| HC | D72M | 3.144 | 1.529 | 2.747 | 0.621 | 1.149 | 2.470 | 377 | 9 |
| HC | D72N | 3.303 | 1.878 | 2.982 | 0.927 | 1.112 | 2.026 | 378 | 9 |
| HC | D72Q | 3.157 | 2.535 | 2.782 | 0.790 | 1.137 | 2.402 | 379 | 9 |
| HC | D72S | 3.166 | 1.894 | 3.042 | 0.931 | 1.041 | 2.037 | 380 | 9 |
| HC | D72V | 3.241 | 2.071 | 3.115 | 1.044 | 1.041 | 1.987 | 381 | 9 |
| HC | D72W | 3.182 | 1.722 | 1.248 | 0.368 | 2.551 | 4.678 | 382 | 9 |
| HC | D72Y | 3.172 | 1.646 | 2.513 | 0.711 | 1.269 | 2.319 | 383 | 9 |
| HC | N73H | 3.095 | 1.105 | 2.128 | 0.423 | 1.455 | 2.618 | 384 | 9 |
| HC | N73R | 2.908 | 1.026 | 1.738 | 0.387 | 1.672 | 2.650 | 385 | 9 |
| HC | N73L | 3.179 | 1.682 | 2.800 | 0.883 | 1.137 | 1.917 | 386 | 9 |
| HC | N73A | 2.307 | 0.773 | 1.016 | 0.300 | 2.229 | 2.589 | 387 | 9 |
| HC | N73C | 3.111 | 1.210 | 2.023 | 0.483 | 1.558 | 2.506 | 388 | 9 |
| HC | N73G | 2.985 | 1.059 | 1.910 | 0.512 | 1.584 | 2.072 | 389 | 9 |
| HC | N73I | 3.336 | 2.124 | 3.024 | 1.005 | 1.107 | 2.116 | 390 | 9 |
| HC | N73M | 3.226 | 1.307 | 1.902 | 0.511 | 1.782 | 2.558 | 391 | 9 |
| HC | N73P | 2.396 | 0.732 | 1.262 | 0.359 | 1.913 | 2.036 | 392 | 9 |
| HC | N73Q | 3.055 | 1.153 | 2.047 | 0.221 | 1.494 | 2.850 | 393 | 9 |
| HC | N73S | 2.962 | 1.097 | 1.959 | 0.485 | 1.541 | 2.265 | 394 | 9 |
| HC | N73T | 2.752 | 1.024 | 1.951 | 0.544 | 1.404 | 1.896 | 395 | 9 |
| HC | N73V | 2.522 | 0.733 | 1.382 | 0.358 | 1.827 | 2.046 | 396 | 9 |
| HC | N73W | 2.294 | 0.718 | 1.278 | 0.342 | 1.783 | 2.100 | 397 | 9 |
| HC | N73Y | 3.150 | 1.234 | 2.165 | 0.464 | 1.455 | 2.656 | 398 | 9 |
| HC | S74K | 2.981 | 1.013 | 1.883 | 0.413 | 1.601 | 2.457 | 399 | 9 |
| HC | S74H | 3.070 | 1.253 | 1.963 | 0.476 | 1.579 | 2.634 | 400 | 9 |
| HC | S74R | 3.062 | 1.331 | 2.222 | 0.511 | 1.387 | 2.604 | 401 | 9 |
| HC | S74L | 3.292 | 2.221 | 3.205 | 1.053 | 1.027 | 2.110 | 402 | 9 |
| HC | S74A | 2.809 | 0.996 | 1.874 | 0.436 | 1.501 | 2.288 | 403 | 9 |
| HC | S74C | 2.721 | 0.882 | 1.705 | 0.347 | 1.619 | 2.544 | 404 | 9 |
| HC | S74D | 2.946 | 1.353 | 1.967 | 0.467 | 1.500 | 2.897 | 405 | 9 |
| HC | S74E | 3.001 | 1.279 | 2.213 | 0.444 | 1.358 | 2.892 | 406 | 9 |
| HC | S74G | 2.857 | 2.244 | 1.714 | 0.429 | 1.762 | 2.895 | 407 | 9 |
| HC | S74I | 2.986 | 1.082 | 2.151 | 0.495 | 1.388 | 2.194 | 408 | 9 |
| HC | S74M | 3.068 | 1.146 | 2.144 | 0.455 | 1.458 | 2.517 | 409 | 9 |
| HC | S74P | 3.196 | 1.545 | 2.503 | 0.615 | 1.280 | 2.511 | 410 | 9 |
| HC | S74T | 3.201 | 1.466 | 2.578 | 0.612 | 1.246 | 2.395 | 411 | 9 |
| HC | S74V | 3.242 | 1.928 | 3.245 | 0.910 | 0.999 | 2.118 | 412 | 9 |
| HC | S74Y | 2.854 | 0.982 | 1.605 | 0.337 | 1.866 | 2.919 | 413 | 9 |
| HC | K75H | 3.278 | 1.961 | 2.863 | 0.371 | 1.146 | 2.638 | 414 | 9 |
| HC | K75R | 3.111 | 1.259 | 2.012 | 0.479 | 1.559 | 2.639 | 415 | 9 |
| HC | K75L | 3.216 | 1.226 | 2.331 | 0.710 | 1.390 | 1.725 | 416 | 9 |
| HC | K75A | 2.879 | 1.070 | 1.846 | 0.428 | 1.570 | 2.504 | 417 | 9 |
| HC | K75C | 3.008 | 1.064 | 1.550 | 0.359 | 1.948 | 2.967 | 418 | 9 |
| HC | K75E | 3.070 | 1.191 | 2.020 | 0.523 | 1.560 | 2.279 | 419 | 9 |
| HC | K75F | 3.068 | 1.189 | 1.735 | 0.388 | 1.770 | 3.064 | 420 | 9 |
| HC | K75M | 2.776 | 0.884 | 1.342 | 0.362 | 2.076 | 2.450 | 421 | 9 |
| HC | K75Q | 3.200 | 1.533 | 2.319 | 0.526 | 1.384 | 2.914 | 422 | 9 |
| HC | K75T | 2.633 | 0.807 | 1.408 | 0.349 | 1.870 | 2.311 | 423 | 9 |
| HC | K75V | 2.908 | 0.939 | 1.435 | 0.325 | 2.032 | 2.962 | 424 | 9 |
| HC | K75W | 2.656 | 0.797 | 1.098 | 0.280 | 2.422 | 2.850 | 425 | 9 |
| HC | K75Y | 2.993 | 1.195 | 1.770 | 0.397 | 1.693 | 3.015 | 426 | 9 |
| HC | S76H | 2.719 | 0.806 | 1.324 | 0.300 | 2.054 | 2.694 | 427 | 9 |
| HC | S76R | 2.877 | 1.042 | 1.473 | 0.328 | 1.953 | 3.171 | 428 | 9 |
| HC | S76L | 2.187 | 0.500 | 0.830 | 0.215 | 2.636 | 2.323 | 429 | 9 |
| HC | S76A | 2.598 | 0.982 | 1.652 | 0.580 | 1.608 | 1.693 | 430 | 9 |
| HC | S76C | 2.490 | 0.855 | 1.304 | 0.339 | 1.910 | 2.537 | 431 | 9 |
| HC | S76D | 2.429 | 1.711 | 1.130 | 0.257 | 2.196 | 2.827 | 432 | 9 |
| HC | S76E | 3.053 | 1.236 | 1.893 | 0.457 | 1.615 | 2.706 | 433 | 9 |
| HC | S76F | 3.013 | 1.143 | 1.958 | 0.443 | 1.540 | 2.582 | 434 | 9 |
| HC | S76M | 2.936 | 1.267 | 1.924 | 0.458 | 1.527 | 2.767 | 435 | 9 |
| HC | S76P | 2.566 | 0.824 | 1.186 | 0.291 | 2.172 | 2.835 | 436 | 9 |
| HC | S76Q | 2.670 | 0.843 | 1.578 | 0.420 | 1.697 | 2.009 | 437 | 9 |
| HC | S76T | 2.515 | 0.805 | 1.182 | 0.268 | 2.133 | 3.024 | 438 | 9 |
| HC | S76Y | 2.788 | 0.921 | 1.393 | 0.344 | 2.004 | 2.685 | 439 | 9 |
| HC | Q77H | 3.135 | 1.285 | 2.396 | 0.640 | 1.310 | 2.008 | 440 | 9 |
| HC | Q77R | 2.600 | 1.185 | 1.976 | 0.618 | 1.344 | 1.957 | 441 | 9 |
| HC | Q77L | 2.256 | 0.589 | 0.937 | 0.234 | 2.408 | 2.520 | 442 | 9 |
| HC | Q77A | 3.109 | 1.370 | 2.320 | 0.532 | 1.343 | 2.577 | 443 | 9 |
| HC | Q77E | 3.162 | 1.660 | 2.729 | 0.331 | 1.159 | 2.647 | 444 | 9 |
| HC | Q77G | 2.148 | 0.548 | 0.843 | 0.216 | 2.551 | 2.545 | 445 | 9 |
| HC | Q77I | 2.653 | 0.784 | 1.189 | 0.292 | 2.232 | 2.690 | 446 | 9 |
| HC | Q77M | 2.489 | 0.861 | 1.213 | 0.289 | 2.108 | 2.989 | 447 | 9 |
| HC | Q77N | 3.002 | 1.184 | 1.800 | 0.471 | 1.668 | 2.516 | 448 | 9 |
| HC | Q77S | 2.791 | 1.085 | 1.936 | 0.496 | 1.441 | 2.193 | 449 | 9 |
| HC | Q77V | 3.246 | 1.643 | 2.722 | 0.633 | 1.193 | 2.597 | 450 | 9 |
| HC | Q77W | 1.891 | 0.537 | 0.880 | 0.243 | 2.149 | 2.209 | 451 | 9 |
| HC | Q77Y | 2.328 | 0.650 | 1.248 | 0.285 | 1.880 | 2.291 | 452 | 9 |
| HC | Y93H | 0.386 | 0.134 | 0.204 | 0.088 | 1.883 | 1.512 | 453 | 9 |
| HC | Y93V | 0.570 | 0.193 | 0.327 | 0.117 | 1.739 | 1.652 | 454 | 9 |
| HC | Y93W | 0.167 | 0.081 | 0.095 | 0.072 | 1.743 | 1.126 | 455 | 9 |
| HC | Y94R | 0.611 | 0.510 | 0.600 | 0.264 | 1.034 | 1.935 | 456 | 9 |
| HC | Y94L | 0.484 | 0.210 | 0.256 | 0.121 | 1.888 | 1.738 | 457 | 9 |
| HC | R97H | 1.065 | 0.411 | 0.502 | 0.219 | 2.148 | 1.884 | 458 | 9 |
| HC | R97W | 0.065 | 0.062 | 0.075 | 0.032 | 0.859 | 0.930 | 459 | 9 |
| HC | A98P | 1.057 | 0.812 | 0.619 | 0.386 | 1.709 | 1.755 | 460 | 9 |
| HC | L99N | 1.202 | 0.662 | 0.655 | 0.401 | 1.836 | 1.652 | 461 | 9 |
| HC | L99W | 1.312 | 1.114 | 0.926 | 0.350 | 1.417 | 1.659 | 462 | 9 |
| HC | T100H | 3.152 | 2.147 | 3.128 | 1.981 | 1.008 | 1.084 | 463 | 9 |
| HC | T100L | 3.133 | 1.851 | 2.685 | 1.361 | 1.167 | 1.364 | 464 | 9 |
| HC | T100A | 3.201 | 2.377 | 2.996 | 1.752 | 1.068 | 1.356 | 465 | 9 |
| HC | T100D | 2.957 | 0.907 | 2.741 | 0.868 | 1.079 | 1.046 | 466 | 9 |
| HC | T100I | 2.910 | 1.690 | 2.199 | 1.376 | 1.448 | 1.229 | 467 | 9 |
| HC | T100N | 3.070 | 1.883 | 2.895 | 1.350 | 1.060 | 1.398 | 468 | 9 |
| HC | T100P | 0.819 | 0.253 | 0.262 | 0.119 | 3.141 | 2.119 | 469 | 9 |
| HC | T100Q | 3.167 | 1.966 | 3.093 | 1.685 | 1.025 | 1.168 | 470 | 9 |
| HC | T100S | 3.166 | 1.748 | 2.953 | 0.816 | 1.072 | 2.142 | 471 | 9 |
| HC | T100V | 3.237 | 1.957 | 2.775 | 1.307 | 1.173 | 1.499 | 472 | 9 |
| HC | T100Y | 2.924 | 1.238 | 2.473 | 0.937 | 1.182 | 1.321 | 473 | 9 |
| HC | Y101H | 3.319 | 2.884 | 3.256 | 2.203 | 1.019 | 1.309 | 474 | 9 |
| HC | Y101E | 0.081 | 0.075 | 0.090 | 0.038 | 0.894 | 0.995 | 475 | 9 |
| HC | Y101F | 2.795 | 0.990 | 1.719 | 0.450 | 1.632 | 2.202 | 476 | 9 |
| HC | Y101M | 3.072 | 1.802 | 2.893 | 1.574 | 1.063 | 1.145 | 477 | 9 |
| HC | Y101W | 3.237 | 1.648 | 3.078 | 0.756 | 1.052 | 2.178 | 478 | 9 |
| HC | Y102R | 0.091 | 0.086 | 0.074 | 0.077 | 1.221 | 1.109 | 479 | 9 |
| HC | Y102C | 0.099 | 0.085 | 0.088 | 0.087 | 1.128 | 1.042 | 480 | 9 |
| HC | Y102D | 0.093 | 0.084 | 0.086 | 0.080 | 1.084 | 1.059 | 481 | 9 |
| HC | Y102I | 0.094 | 0.082 | 0.073 | 0.075 | 1.290 | 1.099 | 482 | 9 |
| HC | Y102N | 0.096 | 0.082 | 0.077 | 0.075 | 1.250 | 1.088 | 483 | 9 |
| HC | Y102W | 3.058 | 1.411 | 2.711 | 0.941 | 1.129 | 1.500 | 484 | 9 |
| HC | D103R | 0.134 | 0.093 | 0.115 | 0.098 | 1.168 | 0.942 | 485 | 9 |
| HC | D103L | 0.082 | 0.095 | 0.085 | 0.034 | 0.963 | 1.307 | 486 | 9 |
| HC | D103A | 3.114 | 0.281 | 2.833 | 1.442 | 1.099 | 0.195 | 487 | 9 |
| HC | D103C | 0.076 | 0.078 | 0.075 | 0.072 | 1.021 | 1.087 | 488 | 9 |
| HC | D103I | 0.109 | 0.091 | 0.087 | 0.091 | 1.254 | 1.006 | 489 | 9 |
| HC | D103P | 0.075 | 0.079 | 0.081 | 0.068 | 0.928 | 1.146 | 490 | 9 |
| HC | D103Q | 2.998 | 1.947 | 2.901 | 1.601 | 1.033 | 1.219 | 491 | 9 |
| HC | D103Y | 0.077 | 0.081 | 0.076 | 0.072 | 1.013 | 1.129 | 492 | 9 |
| HC | Y104H | 1.429 | 0.974 | 0.777 | 0.531 | 1.860 | 1.840 | 493 | 9 |
| HC | Y104L | 1.717 | 0.894 | 0.988 | 0.419 | 1.747 | 2.133 | 494 | 9 |
| HC | Y104D | 0.493 | 0.334 | 0.199 | 0.123 | 2.471 | 2.701 | 495 | 9 |
| HC | Y104F | 1.890 | 1.364 | 0.982 | 0.539 | 1.927 | 2.530 | 496 | 9 |
| HC | Y104I | 1.268 | 0.552 | 0.690 | 0.323 | 1.838 | 1.709 | 497 | 9 |
| HC | Y104M | 0.956 | 0.789 | 0.528 | 0.398 | 1.803 | 1.971 | 498 | 9 |
| HC | Y104S | 0.441 | 0.333 | 0.165 | 0.110 | 2.678 | 3.052 | 499 | 9 |
| HC | Y104V | 0.839 | 0.697 | 0.479 | 0.323 | 1.753 | 2.161 | 500 | 9 |
| HC | E105H | 0.061 | 0.059 | 0.060 | 0.030 | 1.021 | 0.997 | 501 | 9 |
| HC | E105T | 1.103 | 0.655 | 0.751 | 0.385 | 1.469 | 1.701 | 502 | 9 |
| HC | F106L | 1.149 | 0.640 | 0.712 | 0.357 | 1.618 | 1.816 | 503 | 9 |
| HC | F106V | 0.308 | 0.111 | 0.185 | 0.095 | 1.667 | 1.174 | 504 | 9 |
| HC | F106W | 1.076 | 0.399 | 0.748 | 0.229 | 1.420 | 1.749 | 505 | 9 |
| HC | F106Y | 1.705 | 0.929 | 1.699 | 0.530 | 1.008 | 1.753 | 506 | 9 |
| HC | A107K | 1.095 | 0.652 | 1.061 | 0.377 | 1.033 | 1.732 | 507 | 9 |
| HC | A107H | 1.208 | 0.830 | 1.208 | 0.468 | 1.014 | 1.776 | 508 | 9 |
| HC | A107R | 1.354 | 0.832 | 1.162 | 0.485 | 1.165 | 1.717 | 509 | 9 |
| HC | A107L | 1.244 | 0.841 | 0.799 | 0.227 | 1.560 | 1.874 | 510 | 9 |
| HC | A107C | 1.069 | 0.566 | 0.842 | 0.322 | 1.277 | 1.762 | 511 | 9 |
| HC | A107D | 0.952 | 0.485 | 0.587 | 0.271 | 1.624 | 1.787 | 512 | 9 |
| HC | A107E | 1.049 | 0.755 | 0.787 | 0.378 | 1.332 | 1.997 | 513 | 9 |
| HC | A107G | 1.161 | 0.776 | 0.923 | 0.424 | 1.258 | 1.830 | 514 | 9 |
| HC | A107N | 0.990 | 0.567 | 1.035 | 0.316 | 0.995 | 1.799 | 515 | 9 |
| HC | A107S | 1.071 | 0.680 | 1.153 | 0.388 | 0.954 | 1.755 | 516 | 9 |
| HC | A107T | 1.141 | 0.615 | 0.851 | 0.358 | 1.343 | 1.723 | 517 | 9 |
| HC | A107Y | 1.368 | 0.802 | 1.121 | 0.422 | 1.230 | 1.898 | 518 | 9 |
| HC | Y108K | 0.930 | 0.266 | 0.448 | 0.150 | 2.076 | 1.776 | 519 | 9 |
| HC | Y108H | 2.023 | 1.102 | 1.597 | 0.598 | 1.266 | 1.838 | 520 | 9 |
| HC | Y108R | 0.516 | 0.173 | 0.275 | 0.106 | 1.883 | 1.631 | 521 | 9 |
| HC | Y108L | 1.518 | 0.635 | 1.024 | 0.297 | 1.482 | 2.139 | 522 | 9 |
| HC | Y108C | 0.802 | 0.311 | 0.481 | 0.170 | 1.666 | 1.829 | 523 | 9 |
| HC | Y108F | 1.934 | 1.187 | 1.760 | 0.635 | 1.100 | 1.872 | 524 | 9 |
| HC | Y108I | 1.534 | 0.703 | 1.061 | 0.367 | 1.446 | 1.927 | 525 | 9 |
| HC | Y108N | 1.536 | 0.719 | 0.918 | 0.368 | 1.674 | 1.958 | 526 | 9 |
| HC | Y108S | 1.438 | 0.676 | 0.905 | 0.307 | 1.589 | 2.209 | 527 | 9 |
| HC | Y108T | 1.482 | 0.672 | 0.905 | 0.298 | 1.644 | 2.254 | 528 | 9 |
| HC | Y108V | 0.434 | 0.157 | 0.229 | 0.098 | 1.900 | 1.607 | 529 | 9 |
| HC | Y108W | 1.845 | 0.938 | 1.154 | 0.430 | 1.604 | 2.185 | 530 | 9 |
| HC | W109I | 0.919 | 0.266 | 0.470 | 0.151 | 1.957 | 1.755 | 531 | 9 |
| HC | W109M | 1.162 | 0.442 | 0.865 | 0.232 | 1.346 | 1.903 | 532 | 9 |
| HC | W109Y | 0.994 | 0.323 | 0.593 | 0.177 | 1.676 | 1.832 | 533 | 9 |
| HC | G110R | 0.069 | 0.062 | 0.077 | 0.037 | 0.972 | 0.850 | 534 | 9 |
| HC | G110A | 1.937 | 0.839 | 1.589 | 0.541 | 1.229 | 1.552 | 535 | 9 |
| HC | G110M | 0.100 | 0.068 | 0.053 | 0.064 | 1.875 | 1.058 | 536 | 9 |
| HC | G110P | 0.234 | 0.099 | 0.142 | 0.078 | 1.652 | 1.279 | 537 | 9 |
| HC | G110T | 1.117 | 0.371 | 0.774 | 0.234 | 1.442 | 1.594 | 538 | 9 |
| HC | Q111K | 3.167 | 1.888 | 2.878 | 1.122 | 1.101 | 1.693 | 539 | 9 |
| HC | Q111H | 2.442 | 0.722 | 1.412 | 0.363 | 1.729 | 1.992 | 540 | 9 |
| HC | Q111R | 2.940 | 1.110 | 2.019 | 0.507 | 1.456 | 2.192 | 541 | 9 |
| HC | Q111L | 2.960 | 1.155 | 2.111 | 0.542 | 1.403 | 2.132 | 542 | 9 |
| HC | Q111D | 2.881 | 1.072 | 2.046 | 0.503 | 1.417 | 2.132 | 543 | 9 |
| HC | Q111E | 3.087 | 1.497 | 2.422 | 0.649 | 1.275 | 2.311 | 544 | 9 |
| HC | Q111G | 2.853 | 1.136 | 2.115 | 0.568 | 1.351 | 1.998 | 545 | 9 |
| HC | Q111M | 1.621 | 0.420 | 0.776 | 0.093 | 2.094 | 2.197 | 546 | 9 |
| HC | Q111P | 2.558 | 0.817 | 1.423 | 0.369 | 1.797 | 2.211 | 547 | 9 |
| HC | Q111S | 2.912 | 1.292 | 2.334 | 0.588 | 1.250 | 2.204 | 548 | 9 |
| HC | Q111T | 3.156 | 2.059 | 2.713 | 1.020 | 1.163 | 2.018 | 549 | 9 |
| HC | Q111V | 0.928 | 0.287 | 0.389 | 0.143 | 2.426 | 2.021 | 1064 | 9 |
| HC | Q111W | 2.633 | 0.820 | 1.533 | 0.366 | 1.721 | 2.241 | 550 | 9 |
| HC | Q111Y | 2.705 | 1.111 | 1.891 | 0.506 | 1.431 | 2.192 | 551 | 9 |
| HC | G112A | 1.008 | 0.276 | 0.609 | 0.168 | 1.657 | 1.645 | 552 | 9 |
| HC | G112N | 0.152 | 0.218 | 0.120 | 0.074 | 1.269 | 1.075 | 553 | 9 |
| HC | G112P | 1.396 | 0.443 | 1.154 | 0.293 | 1.210 | 1.515 | 554 | 9 |
| HC | G112S | 0.774 | 0.208 | 0.537 | 0.142 | 1.442 | 1.462 | 555 | 9 |
| HC | G112T | 0.195 | 0.085 | 0.129 | 0.072 | 1.509 | 1.169 | 556 | 9 |
| HC | G112Y | 0.176 | 0.080 | 0.114 | 0.068 | 1.565 | 1.172 | 557 | 9 |
| LC | D1W | 2.925 | 1.768 | 2.617 | 0.583 | 1.124 | 1.594 | 8 | 810 |
| LC | I2C | 2.076 | 1.460 | 1.622 | 0.332 | 1.284 | 1.475 | 8 | 811 |
| LC | I2V | 2.520 | 1.080 | 1.908 | 0.530 | 1.326 | 2.054 | 8 | 812 |
| LC | I2W | 1.308 | 0.324 | 0.909 | 0.092 | 1.448 | 3.539 | 8 | 813 |
| LC | L3D | 0.977 | 0.280 | 0.481 | 0.149 | 2.031 | 1.898 | 8 | 814 |
| LC | L3F | 1.085 | 0.313 | 0.495 | 0.178 | 2.194 | 1.784 | 8 | 815 |
| LC | L3G | 3.056 | 2.119 | 3.021 | 0.406 | 1.015 | 2.677 | 8 | 816 |
| LC | L3S | 1.494 | 0.390 | 0.760 | 0.219 | 1.967 | 1.780 | 8 | 817 |
| LC | L3T | 2.433 | 0.850 | 1.908 | 0.396 | 1.276 | 2.157 | 8 | 818 |
| LC | L3V | 2.544 | 1.051 | 2.034 | 0.294 | 1.258 | 3.578 | 8 | 819 |
| LC | L3W | 2.342 | 0.652 | 1.239 | 0.313 | 1.891 | 2.088 | 8 | 820 |
| LC | L3Y | 2.522 | 0.894 | 1.958 | 0.476 | 1.310 | 1.881 | 8 | 821 |
| LC | L3R | 3.123 | 1.858 | 3.257 | 0.799 | 0.959 | 2.324 | 8 | 822 |
| LC | L4C | 1.277 | 0.354 | 0.511 | 0.172 | 2.500 | 2.065 | 8 | 823 |
| LC | L4E | 2.282 | 0.635 | 0.992 | 0.268 | 2.301 | 2.374 | 8 | 824 |
| LC | L4F | 0.666 | 0.196 | 0.257 | 0.105 | 2.595 | 1.876 | 8 | 825 |
| LC | L4I | 2.044 | 0.594 | 0.954 | 0.244 | 2.141 | 2.445 | 8 | 826 |
| LC | L4P | 1.034 | 0.288 | 0.434 | 0.143 | 2.387 | 2.025 | 8 | 827 |
| LC | L4S | 0.714 | 0.207 | 0.286 | 0.108 | 2.496 | 1.928 | 8 | 828 |
| LC | L4T | 1.397 | 0.383 | 0.540 | 0.163 | 2.594 | 2.343 | 8 | 829 |
| LC | L4V | 1.497 | 0.413 | 0.573 | 0.085 | 2.614 | 2.559 | 8 | 830 |
| LC | L4W | 0.867 | 0.225 | 0.331 | 0.115 | 2.626 | 1.962 | 8 | 831 |
| LC | L4K | 0.917 | 0.249 | 0.363 | 0.122 | 2.555 | 2.042 | 8 | 832 |
| LC | L4H | 1.168 | 0.298 | 0.395 | 0.139 | 2.948 | 2.152 | 8 | 833 |
| LC | L4R | 2.025 | 0.583 | 0.817 | 0.229 | 2.507 | 2.543 | 8 | 834 |
| LC | T5A | 2.306 | 1.577 | 1.307 | 0.268 | 1.768 | 2.845 | 8 | 835 |
| LC | T5C | 1.929 | 0.521 | 0.747 | 0.192 | 2.622 | 2.719 | 8 | 836 |
| LC | T5D | 2.275 | 0.814 | 1.408 | 0.289 | 1.615 | 2.818 | 8 | 837 |
| LC | T5E | 2.809 | 1.421 | 2.377 | 0.555 | 1.182 | 2.564 | 8 | 838 |
| LC | T5F | 2.403 | 0.890 | 1.568 | 0.351 | 1.532 | 2.537 | 8 | 839 |
| LC | T5G | 2.079 | 0.697 | 1.277 | 0.267 | 1.629 | 2.608 | 8 | 840 |
| LC | T5N | 2.438 | 0.947 | 1.721 | 0.363 | 1.417 | 2.609 | 8 | 841 |
| LC | T5P | 1.226 | 0.364 | 0.584 | 0.171 | 2.098 | 2.127 | 8 | 1067 |
| LC | T5S | 2.515 | 0.908 | 1.421 | 0.320 | 1.772 | 2.843 | 8 | 842 |
| LC | T5W | 2.195 | 0.701 | 1.131 | 0.246 | 1.943 | 2.854 | 8 | 843 |
| LC | T5L | 2.512 | 1.262 | 2.186 | 0.525 | 1.149 | 2.405 | 8 | 844 |
| LC | T5K | 2.558 | 0.944 | 1.638 | 0.370 | 1.562 | 2.556 | 8 | 845 |
| LC | T5H | 2.800 | 1.163 | 1.669 | 0.355 | 1.678 | 3.277 | 8 | 846 |
| LC | T5R | 2.633 | 1.328 | 1.846 | 0.423 | 1.428 | 3.143 | 8 | 847 |
| LC | R24A | 2.819 | 1.801 | 2.525 | 0.751 | 1.119 | 2.406 | 8 | 848 |
| LC | R24C | 2.004 | 0.612 | 1.021 | 0.249 | 1.965 | 2.460 | 8 | 849 |
| LC | R24F | 2.121 | 0.749 | 1.259 | 0.288 | 1.688 | 2.605 | 8 | 850 |
| LC | R24G | 1.023 | 0.297 | 0.396 | 0.133 | 2.599 | 2.237 | 8 | 1068 |
| LC | R24L | 2.886 | 1.764 | 2.615 | 0.748 | 1.104 | 2.372 | 8 | 851 |
| LC | R24M | 2.880 | 2.141 | 2.619 | 0.562 | 1.100 | 1.749 | 8 | 852 |
| LC | R24S | 2.443 | 0.980 | 1.621 | 0.365 | 1.508 | 2.689 | 8 | 853 |
| LC | R24W | 2.019 | 0.655 | 1.111 | 0.261 | 1.816 | 2.512 | 8 | 854 |
| LC | R24Y | 2.557 | 1.315 | 2.221 | 0.545 | 1.152 | 2.413 | 8 | 855 |
| LC | A25C | 2.233 | 0.712 | 1.754 | 0.334 | 1.275 | 2.130 | 8 | 856 |
| LC | A25G | 2.406 | 1.123 | 2.373 | 0.568 | 1.014 | 1.986 | 8 | 857 |
| LC | A25L | 1.794 | 0.494 | 1.182 | 0.240 | 1.534 | 2.063 | 8 | 858 |
| LC | A25V | 2.351 | 1.883 | 1.718 | 0.463 | 1.370 | 1.926 | 8 | 859 |
| LC | S26A | 2.032 | 0.623 | 1.194 | 0.320 | 1.703 | 1.949 | 8 | 860 |
| LC | S26C | 1.490 | 0.370 | 0.672 | 0.204 | 2.232 | 1.814 | 8 | 861 |
| LC | S26D | 1.076 | 1.362 | 0.504 | 0.199 | 2.140 | 1.689 | 8 | 862 |
| LC | S26I | 1.847 | 0.549 | 1.137 | 0.297 | 1.642 | 1.850 | 8 | 863 |
| LC | S26M | 1.882 | 0.511 | 0.944 | 0.271 | 1.999 | 1.920 | 8 | 864 |
| LC | S26N | 2.649 | 1.069 | 2.006 | 0.472 | 1.325 | 2.269 | 8 | 865 |
| LC | S26V | 1.023 | 0.318 | 0.487 | 0.181 | 2.104 | 1.778 | 8 | 866 |
| LC | S26W | 1.416 | 0.394 | 0.640 | 0.211 | 2.215 | 1.871 | 8 | 867 |
| LC | S26L | 2.514 | 0.892 | 1.679 | 0.460 | 1.498 | 1.938 | 8 | 868 |
| LC | S26G | 2.563 | 1.076 | 1.773 | 0.470 | 1.448 | 2.293 | 8 | 869 |
| LC | S26H | 2.686 | 1.429 | 2.620 | 0.764 | 1.029 | 1.871 | 8 | 870 |
| LC | S26R | 0.578 | 0.206 | 0.310 | 0.166 | 1.869 | 1.245 | 8 | 871 |
| LC | Q27A | 2.910 | 1.942 | 2.602 | 0.970 | 1.118 | 2.002 | 8 | 872 |
| LC | Q27D | 2.850 | 1.856 | 2.682 | 0.962 | 1.064 | 1.940 | 8 | 873 |
| LC | Q27E | 2.980 | 1.656 | 2.752 | 0.774 | 1.084 | 2.141 | 8 | 874 |
| LC | Q27F | 3.022 | 1.396 | 2.597 | 0.684 | 1.164 | 2.044 | 8 | 875 |
| LC | Q27I | 3.166 | 2.049 | 2.605 | 1.092 | 1.216 | 1.881 | 8 | 876 |
| LC | Q27M | 3.076 | 1.975 | 2.485 | 0.917 | 1.243 | 2.153 | 8 | 877 |
| LC | Q27N | 2.816 | 1.768 | 2.563 | 0.976 | 1.099 | 1.811 | 8 | 878 |
| LC | Q27P | 1.967 | 1.368 | 1.815 | 0.645 | 1.128 | 2.123 | 8 | 879 |
| LC | Q27T | 3.165 | 2.567 | 2.919 | 0.861 | 1.085 | 1.506 | 8 | 880 |
| LC | S28A | 2.339 | 0.741 | 1.315 | 0.353 | 1.779 | 2.100 | 8 | 881 |
| LC | S28D | 2.972 | 1.878 | 2.403 | 0.971 | 1.268 | 1.964 | 8 | 882 |
| LC | S28N | 3.165 | 2.818 | 3.278 | 1.196 | 0.966 | 1.114 | 8 | 883 |
| LC | S28Q | 2.869 | 1.140 | 2.247 | 0.527 | 1.277 | 2.168 | 8 | 884 |
| LC | S28L | 1.871 | 0.518 | 1.004 | 0.256 | 1.859 | 2.022 | 8 | 885 |
| LC | S28K | 2.492 | 0.759 | 1.663 | 0.411 | 1.499 | 1.871 | 8 | 886 |
| LC | S28H | 2.843 | 1.108 | 2.146 | 0.484 | 1.325 | 2.293 | 8 | 887 |
| LC | I29A | 2.899 | 1.699 | 2.373 | 0.947 | 1.222 | 1.796 | 8 | 888 |
| LC | I29E | 2.217 | 0.833 | 1.193 | 0.437 | 1.862 | 1.908 | 8 | 889 |
| LC | I29F | 2.761 | 1.091 | 1.913 | 0.613 | 1.444 | 1.781 | 8 | 890 |
| LC | I29S | 2.910 | 1.745 | 1.779 | 0.627 | 1.742 | 3.037 | 8 | 891 |
| LC | I29T | 2.967 | 1.544 | 2.317 | 0.796 | 1.282 | 1.944 | 8 | 892 |
| LC | I29R | 0.124 | 1.528 | 0.294 | 0.140 | 0.422 | 0.673 | 8 | 893 |
| LC | G30A | 2.660 | 1.192 | 2.154 | 0.626 | 1.236 | 1.905 | 8 | 894 |
| LC | G30E | 3.158 | 1.981 | 2.865 | 1.070 | 1.109 | 1.852 | 8 | 895 |
| LC | G30F | 2.951 | 1.136 | 2.046 | 0.474 | 1.442 | 2.408 | 8 | 896 |
| LC | G30I | 2.653 | 1.210 | 2.221 | 0.642 | 1.195 | 1.885 | 8 | 897 |
| LC | G30M | 3.077 | 1.589 | 2.595 | 0.864 | 1.189 | 1.841 | 8 | 898 |
| LC | G30P | 2.643 | 1.034 | 1.826 | 0.541 | 1.447 | 1.911 | 8 | 899 |
| LC | G30Q | 2.855 | 1.151 | 2.261 | 0.608 | 1.263 | 1.895 | 8 | 900 |
| LC | G30S | 2.918 | 1.562 | 2.272 | 0.708 | 1.284 | 2.213 | 8 | 901 |
| LC | G30V | 2.539 | 0.882 | 1.477 | 0.406 | 1.720 | 2.172 | 8 | 902 |
| LC | G30Y | 2.270 | 0.630 | 1.137 | 0.244 | 1.998 | 2.586 | 8 | 903 |
| LC | G30L | 3.075 | 1.525 | 2.530 | 0.351 | 1.216 | 2.155 | 8 | 904 |
| LC | G30K | 2.747 | 0.945 | 1.681 | 0.385 | 1.634 | 2.456 | 8 | 905 |
| LC | G30H | 2.864 | 1.080 | 2.184 | 0.577 | 1.317 | 1.874 | 8 | 906 |
| LC | G30R | 2.634 | 1.078 | 2.126 | 0.529 | 1.239 | 2.041 | 8 | 907 |
| LC | T31A | 3.109 | 1.829 | 2.594 | 0.794 | 1.202 | 2.305 | 8 | 908 |
| LC | T31F | 2.585 | 1.954 | 1.545 | 0.378 | 1.673 | 2.444 | 8 | 909 |
| LC | T31G | 3.135 | 1.900 | 2.537 | 0.908 | 1.236 | 2.093 | 8 | 910 |
| LC | T31M | 3.168 | 2.090 | 2.724 | 0.921 | 1.163 | 2.270 | 8 | 911 |
| LC | T31S | 3.017 | 1.525 | 2.487 | 0.796 | 1.213 | 1.916 | 8 | 912 |
| LC | T31V | 3.059 | 1.618 | 2.684 | 0.843 | 1.140 | 1.923 | 8 | 913 |
| LC | T31W | 2.825 | 1.133 | 1.755 | 0.480 | 1.639 | 2.359 | 8 | 914 |
| LC | T31L | 2.910 | 1.274 | 2.135 | 0.647 | 1.365 | 1.969 | 8 | 915 |
| LC | T31K | 3.195 | 2.263 | 2.923 | 1.161 | 1.093 | 1.949 | 8 | 916 |
| LC | T31H | 3.172 | 2.169 | 3.026 | 1.098 | 1.049 | 1.976 | 8 | 917 |
| LC | N32G | 2.507 | 2.003 | 2.318 | 0.992 | 1.081 | 1.057 | 8 | 918 |
| LC | I33F | 2.150 | 0.712 | 1.647 | 0.362 | 1.306 | 1.971 | 8 | 919 |
| LC | I33G | 0.497 | 0.726 | 0.321 | 0.122 | 1.552 | 1.396 | 8 | 920 |
| LC | I33M | 2.452 | 0.922 | 1.788 | 0.471 | 1.391 | 1.957 | 8 | 921 |
| LC | I33T | 2.308 | 0.841 | 1.714 | 0.447 | 1.351 | 1.880 | 8 | 922 |
| LC | I33V | 2.684 | 1.395 | 2.296 | 0.674 | 1.171 | 2.089 | 8 | 923 |
| LC | I33H | 0.520 | 0.162 | 0.305 | 0.101 | 1.707 | 1.603 | 8 | 924 |
| LC | I48M | 3.195 | 2.000 | 2.971 | 0.998 | 1.076 | 2.004 | 8 | 925 |
| LC | I48S | 2.486 | 1.520 | 2.469 | 0.741 | 1.007 | 1.037 | 8 | 926 |
| LC | I48L | 3.126 | 1.720 | 2.560 | 0.804 | 1.221 | 2.142 | 8 | 927 |
| LC | I48K | 3.092 | 1.618 | 2.624 | 0.785 | 1.180 | 2.062 | 8 | 928 |
| LC | K49A | 3.111 | 2.465 | 3.143 | 1.634 | 0.990 | 1.508 | 8 | 929 |
| LC | K49E | 2.831 | 1.362 | 2.504 | 0.999 | 1.136 | 1.374 | 8 | 930 |
| LC | K49F | 2.953 | 1.733 | 2.622 | 0.910 | 1.126 | 1.904 | 8 | 931 |
| LC | K49G | 3.059 | 2.388 | 3.056 | 1.493 | 1.001 | 1.602 | 8 | 932 |
| LC | K49N | 2.967 | 2.078 | 2.833 | 1.037 | 1.048 | 2.009 | 8 | 933 |
| LC | K49Q | 3.070 | 2.336 | 2.908 | 1.708 | 1.058 | 1.376 | 8 | 934 |
| LC | K49S | 3.179 | 2.802 | 3.199 | 1.890 | 0.994 | 1.485 | 8 | 935 |
| LC | K49T | 3.161 | 2.528 | 3.076 | 1.343 | 1.028 | 1.884 | 8 | 936 |
| LC | K49V | 3.087 | 1.831 | 2.694 | 0.947 | 1.145 | 1.934 | 8 | 937 |
| LC | K49Y | 2.948 | 1.490 | 2.252 | 0.699 | 1.309 | 2.130 | 8 | 938 |
| LC | K49L | 2.767 | 2.365 | 2.614 | 1.220 | 1.060 | 1.459 | 8 | 939 |
| LC | K49H | 3.068 | 1.734 | 2.749 | 0.736 | 1.116 | 2.356 | 8 | 940 |
| LC | K49R | 3.091 | 2.911 | 3.020 | 2.277 | 1.023 | 1.278 | 8 | 941 |
| LC | A51T | 2.711 | 1.309 | 1.762 | 0.477 | 1.541 | 2.749 | 8 | 942 |
| LC | A51L | 2.611 | 1.889 | 2.090 | 0.781 | 1.250 | 1.595 | 8 | 943 |
| LC | S52A | 3.173 | 2.440 | 2.815 | 0.622 | 1.130 | 2.031 | 8 | 944 |
| LC | S52C | 2.145 | 0.676 | 1.079 | 0.250 | 1.995 | 2.709 | 8 | 945 |
| LC | S52D | 3.127 | 2.159 | 2.649 | 0.884 | 1.180 | 2.446 | 8 | 946 |
| LC | S52E | 2.874 | 1.773 | 2.495 | 0.691 | 1.152 | 2.569 | 8 | 947 |
| LC | S52G | 2.398 | 0.920 | 1.424 | 0.356 | 1.692 | 2.585 | 8 | 948 |
| LC | S52I | 2.301 | 0.928 | 1.450 | 0.358 | 1.599 | 2.598 | 8 | 949 |
| LC | S52M | 2.462 | 0.880 | 1.489 | 0.312 | 1.668 | 2.833 | 8 | 950 |
| LC | S52Q | 2.678 | 1.044 | 1.825 | 0.409 | 1.471 | 2.562 | 8 | 951 |
| LC | S52V | 2.799 | 1.545 | 2.259 | 0.639 | 1.240 | 2.420 | 8 | 952 |
| LC | S52W | 2.632 | 1.007 | 1.620 | 0.386 | 1.632 | 2.623 | 8 | 953 |
| LC | S52R | 3.133 | 1.934 | 2.294 | 0.746 | 1.367 | 2.604 | 8 | 954 |
| LC | S52K | 3.028 | 1.494 | 1.964 | 0.510 | 1.542 | 2.954 | 8 | 955 |
| LC | E53G | 0.182 | 0.173 | 0.122 | 0.076 | 1.605 | 1.489 | 8 | 956 |
| LC | S54M | 2.365 | 2.496 | 2.846 | 1.362 | 0.831 | 1.427 | 8 | 957 |
| LC | I55A | 2.591 | 1.923 | 2.689 | 0.728 | 0.964 | 1.318 | 8 | 958 |
| LC | I55F | 2.450 | 1.521 | 2.503 | 0.781 | 0.980 | 1.950 | 8 | 959 |
| LC | S56G | 3.158 | 2.562 | 2.991 | 1.497 | 1.056 | 1.719 | 8 | 960 |
| LC | S56L | 3.088 | 2.195 | 2.849 | 1.078 | 1.084 | 2.042 | 8 | 961 |
| LC | S56A | 3.072 | 2.332 | 3.031 | 1.328 | 1.015 | 1.759 | 8 | 962 |
| LC | S56C | 2.974 | 1.448 | 2.383 | 0.328 | 1.250 | 2.158 | 8 | 963 |
| LC | S56D | 3.060 | 1.994 | 2.841 | 1.165 | 1.077 | 1.711 | 8 | 964 |
| LC | S56E | 3.130 | 2.431 | 2.972 | 1.482 | 1.053 | 1.642 | 8 | 965 |
| LC | S56F | 3.095 | 2.008 | 2.961 | 1.102 | 1.046 | 1.824 | 8 | 966 |
| LC | S56N | 3.043 | 2.136 | 3.044 | 1.188 | 1.000 | 1.804 | 8 | 967 |
| LC | S56P | 3.120 | 2.744 | 3.119 | 2.194 | 1.000 | 1.251 | 8 | 968 |
| LC | S56Q | 3.136 | 2.242 | 2.999 | 1.207 | 1.046 | 1.858 | 8 | 969 |
| LC | S56V | 3.034 | 2.233 | 2.949 | 1.338 | 1.029 | 1.671 | 8 | 970 |
| LC | S56W | 3.044 | 1.944 | 2.720 | 0.978 | 1.119 | 1.988 | 8 | 971 |
| LC | S56H | 0.132 | 0.088 | 0.100 | 0.094 | 1.309 | 0.932 | 8 | 972 |
| LC | S56R | 3.035 | 1.896 | 2.681 | 0.952 | 1.132 | 1.992 | 8 | 973 |
| LC | S56K | 3.126 | 2.375 | 2.994 | 1.459 | 1.044 | 1.629 | 8 | 974 |
| LC | Y86F | 0.314 | 0.106 | 0.176 | 0.083 | 1.789 | 1.291 | 8 | 975 |
| LC | Y86M | 0.265 | 0.095 | 0.152 | 0.077 | 1.751 | 1.235 | 8 | 976 |
| LC | Y86H | 0.454 | 0.140 | 0.259 | 0.046 | 1.754 | 1.475 | 8 | 977 |
| LC | Y87L | 1.364 | 0.391 | 0.662 | 0.189 | 2.060 | 2.070 | 8 | 978 |
| LC | Y87C | 2.233 | 0.766 | 1.316 | 0.354 | 1.697 | 2.169 | 8 | 979 |
| LC | Y87D | 0.692 | 0.193 | 0.295 | 0.114 | 2.345 | 1.700 | 8 | 980 |
| LC | Y87F | 2.372 | 1.681 | 2.434 | 1.000 | 0.981 | 1.709 | 8 | 981 |
| LC | Y87G | 0.941 | 0.252 | 0.344 | 0.118 | 2.738 | 2.145 | 8 | 982 |
| LC | Y87I | 2.941 | 1.874 | 2.773 | 0.977 | 1.061 | 1.917 | 8 | 983 |
| LC | Y87N | 1.369 | 0.921 | 0.571 | 0.166 | 2.397 | 2.199 | 8 | 984 |
| LC | Y87P | 0.697 | 0.195 | 0.358 | 0.144 | 1.947 | 1.353 | 8 | 985 |
| LC | Y87S | 2.337 | 0.880 | 1.488 | 0.387 | 1.571 | 2.273 | 8 | 986 |
| LC | Y87T | 2.232 | 0.926 | 1.739 | 0.533 | 1.283 | 1.746 | 8 | 987 |
| LC | Y87V | 2.621 | 1.571 | 2.360 | 0.730 | 1.110 | 2.155 | 8 | 988 |
| LC | Y87W | 2.260 | 1.231 | 2.159 | 0.739 | 1.046 | 1.667 | 8 | 989 |
| LC | Y87K | 1.493 | 0.385 | 0.700 | 0.207 | 2.137 | 1.860 | 8 | 990 |
| LC | Y87H | 0.295 | 0.118 | 0.194 | 0.104 | 1.522 | 1.132 | 8 | 991 |
| LC | Y87R | 1.711 | 0.562 | 0.997 | 0.296 | 1.716 | 1.949 | 8 | 992 |
| LC | Q89E | 2.195 | 0.799 | 1.637 | 0.441 | 1.342 | 1.815 | 8 | 993 |
| LC | N91L | 0.334 | 0.124 | 0.162 | 0.087 | 2.064 | 1.421 | 8 | 994 |
| LC | N91A | 2.624 | 2.060 | 2.319 | 1.753 | 1.131 | 1.182 | 8 | 995 |
| LC | N91C | 2.633 | 1.226 | 2.163 | 0.790 | 1.219 | 1.553 | 8 | 996 |
| LC | N91I | 2.911 | 1.849 | 2.630 | 0.571 | 1.108 | 1.607 | 8 | 997 |
| LC | N91M | 2.428 | 1.480 | 2.182 | 1.132 | 1.114 | 1.308 | 8 | 998 |
| LC | N91S | 2.994 | 2.783 | 2.760 | 2.387 | 1.085 | 1.166 | 8 | 999 |
| LC | N91T | 2.831 | 1.991 | 2.546 | 1.387 | 1.113 | 1.435 | 8 | 1000 |
| LC | N91V | 2.740 | 1.978 | 2.498 | 1.686 | 1.098 | 1.173 | 8 | 1001 |
| LC | N91H | 2.919 | 1.694 | 2.691 | 0.876 | 1.085 | 1.940 | 8 | 1002 |
| LC | N91R | 0.097 | 0.080 | 0.083 | 0.075 | 1.159 | 1.056 | 8 | 1003 |
| LC | N92C | 2.942 | 1.540 | 2.633 | 1.142 | 1.118 | 1.349 | 8 | 1004 |
| LC | N92D | 3.181 | 2.318 | 2.980 | 1.686 | 1.067 | 1.375 | 8 | 1005 |
| LC | N92L | 2.733 | 1.469 | 2.812 | 0.741 | 0.972 | 1.983 | 8 | 1006 |
| LC | N92M | 2.853 | 1.874 | 2.849 | 0.876 | 1.002 | 2.139 | 8 | 1007 |
| LC | N92S | 2.560 | 1.897 | 2.199 | 1.094 | 1.165 | 1.733 | 8 | 1008 |
| LC | N92T | 2.583 | 2.056 | 2.586 | 1.336 | 0.997 | 1.551 | 8 | 1009 |
| LC | N92V | 3.125 | 2.740 | 3.058 | 1.851 | 1.022 | 1.484 | 8 | 1010 |
| LC | N92W | 2.147 | 1.772 | 1.969 | 1.546 | 1.092 | 1.146 | 8 | 1011 |
| LC | N92Y | 2.125 | 0.636 | 1.703 | 0.477 | 1.248 | 1.332 | 8 | 1012 |
| LC | N92H | 3.094 | 2.440 | 2.804 | 1.941 | 1.103 | 1.257 | 8 | 1013 |
| LC | N92K | 2.429 | 0.625 | 2.546 | 0.519 | 0.955 | 2.118 | 8 | 1014 |
| LC | N92R | 3.085 | 1.643 | 2.966 | 0.691 | 1.040 | 2.377 | 8 | 1015 |
| LC | N93T | 0.197 | 0.094 | 0.192 | 0.048 | 1.029 | 1.021 | 8 | 1016 |
| LC | T96L | 3.174 | 1.793 | 2.779 | 0.701 | 1.176 | 2.936 | 8 | 1017 |
| LC | T96C | 2.941 | 1.378 | 2.394 | 0.699 | 1.230 | 1.972 | 8 | 1018 |
| LC | T96M | 2.899 | 1.972 | 2.673 | 0.834 | 1.084 | 1.673 | 8 | 1019 |
| LC | T96V | 3.101 | 1.774 | 3.006 | 0.936 | 1.032 | 1.898 | 8 | 1020 |
| LC | T97L | 2.411 | 0.799 | 1.773 | 0.399 | 1.366 | 2.004 | 8 | 1021 |
| LC | T97A | 2.794 | 1.273 | 3.309 | 0.332 | 0.845 | 1.954 | 8 | 1022 |
| LC | T97D | 1.749 | 0.461 | 1.007 | 0.237 | 1.737 | 1.951 | 8 | 1023 |
| LC | T97G | 1.691 | 0.521 | 1.423 | 0.276 | 1.190 | 1.888 | 8 | 1024 |
| LC | T97Q | 2.618 | 1.004 | 2.602 | 0.537 | 1.005 | 1.869 | 8 | 1025 |
| LC | T97S | 2.108 | 0.545 | 1.884 | 0.260 | 1.119 | 2.095 | 8 | 1026 |
| LC | T97V | 2.316 | 0.998 | 2.021 | 0.517 | 1.151 | 1.935 | 8 | 1027 |
| LC | T97K | 2.211 | 0.892 | 2.542 | 0.491 | 0.870 | 1.816 | 8 | 1028 |
| LC | T97R | 0.542 | 0.180 | 0.282 | 0.127 | 1.922 | 1.420 | 8 | 1029 |
| LC | F98A | 0.999 | 0.296 | 0.635 | 0.096 | 1.573 | 1.537 | 8 | 1030 |
| LC | F98M | 2.228 | 0.686 | 1.414 | 0.431 | 1.582 | 1.600 | 8 | 1031 |
| LC | F98S | 1.532 | 0.467 | 1.079 | 0.299 | 1.422 | 1.560 | 8 | 1032 |
| LC | F98V | 1.895 | 0.533 | 1.161 | 0.315 | 1.645 | 1.699 | 8 | 1033 |
| LC | F98Y | 2.871 | 1.365 | 2.439 | 0.785 | 1.177 | 1.738 | 8 | 1034 |
| LC | G99L | 0.578 | 0.164 | 0.310 | 0.096 | 1.864 | 1.713 | 8 | 1035 |
| LC | G99D | 0.521 | 0.132 | 0.308 | 0.088 | 1.692 | 1.498 | 8 | 1036 |
| LC | G99E | 0.496 | 0.166 | 0.300 | 0.126 | 1.655 | 1.324 | 8 | 1037 |
| LC | G99F | 0.583 | 0.183 | 0.255 | 0.094 | 2.288 | 1.940 | 8 | 1038 |
| LC | G99I | 0.480 | 0.141 | 0.293 | 0.100 | 1.645 | 1.420 | 8 | 1039 |
| LC | G99M | 0.599 | 0.182 | 0.291 | 0.111 | 2.057 | 1.640 | 8 | 1040 |
| LC | G99N | 0.611 | 0.154 | 0.373 | 0.124 | 1.639 | 1.235 | 8 | 1041 |
| LC | G99S | 1.517 | 0.525 | 1.365 | 0.236 | 1.112 | 2.226 | 8 | 1042 |
| LC | G99T | 1.203 | 0.307 | 0.812 | 0.173 | 1.488 | 1.783 | 8 | 1043 |
| LC | G99V | 0.701 | 0.186 | 0.431 | 0.105 | 1.631 | 1.768 | 8 | 1044 |
| LC | G99K | 0.360 | 0.120 | 0.203 | 0.042 | 1.793 | 1.481 | 8 | 1045 |
| LC | G99H | 0.496 | 0.126 | 0.346 | 0.069 | 1.440 | 1.831 | 8 | 1046 |
| LC | Q100C | 2.836 | 1.308 | 2.238 | 0.619 | 1.278 | 2.113 | 8 | 1047 |
| LC | Q100D | 3.035 | 2.136 | 3.057 | 1.429 | 0.993 | 1.495 | 8 | 1048 |
| LC | Q100E | 2.932 | 1.985 | 2.880 | 1.120 | 1.018 | 1.773 | 8 | 1049 |
| LC | Q100F | 3.039 | 2.002 | 2.863 | 1.155 | 1.061 | 1.736 | 8 | 1050 |
| LC | Q100I | 2.917 | 1.641 | 2.727 | 0.974 | 1.070 | 1.685 | 8 | 1051 |
| LC | Q100M | 3.079 | 1.799 | 2.753 | 1.005 | 1.119 | 1.802 | 8 | 1052 |
| LC | Q100N | 3.113 | 2.782 | 3.138 | 2.163 | 0.992 | 1.287 | 8 | 1053 |
| LC | Q100P | 3.072 | 2.357 | 3.146 | 1.497 | 0.977 | 1.575 | 8 | 1054 |
| LC | Q100T | 3.064 | 2.278 | 2.950 | 0.612 | 1.039 | 1.778 | 8 | 1055 |
| LC | Q100V | 3.095 | 2.148 | 2.942 | 1.292 | 1.052 | 1.671 | 8 | 1056 |
| LC | Q100W | 2.873 | 1.702 | 2.757 | 0.853 | 1.043 | 2.000 | 8 | 1057 |
| LC | Q100Y | 3.170 | 2.395 | 3.173 | 1.671 | 0.999 | 1.439 | 8 | 1058 |
| LC | Q100K | 3.076 | 2.031 | 2.852 | 1.110 | 1.078 | 1.834 | 8 | 1059 |
| LC | Q100H | 3.096 | 2.050 | 2.942 | 1.261 | 1.053 | 1.628 | 8 | 1060 |
| LC | Q100R | 2.930 | 1.902 | 2.831 | 1.030 | 1.035 | 1.846 | 8 | 1061 |

^{a}HC = Heavy Chain; LC = Light Chain
^{b}V = variable

[0904] d. Determining Antibody Concentration

[0905] The antibody concentration was determined by anti-EGFR antibody quantitation ELISA. Briefly, plates were coated with 100 μL sEGFR-H6 (Sino Biologicals Inc, Cat#10001-H08H) antigen at 12 nM (1.32 ug/mL) in PBS; washed three times with 250 μl/well of PBS; and blocked for 1 hour at room temperature with 250 μl of PBS with 5 mg/mL BSA. Serial dilutions of anti-EGFR-FLAG antibody standards (protein A column purified) were prepared in PBS with 5 mg/mL BSA. The starting antibody concentration was 100 ng/mL followed by 1:3 dilutions as specified. Test sample dilutions were prepared (1:3 dilutions), and 100 μl/well of standard and test sample were added to wells and incubated at room temperature for 1 hr. Plates were washed 3× with 250 μl/well of PBS with 5 mg/mL BSA. 100 μL/well rabbit anti-human IgG-Fc-HRP was added at 1:5000 (final concentration 0.2 μL/mL) dilution in PBS/5 mg/mL BSA. The plate was incubated for 1 hr at RT; washed 3× with 250 μl/well of PBS/5 mg/mL BSA. TMB Substrate was added and plates were read as described above.

[0906] e. Calculating Specific Activity

[0907] The specific activity (SA) was calculated by dividing the average OD value by the antibody concentration. The specific activity was then normalized to give a normalized specific activity (NSA) for each variant by dividing the specific activity of the variant anti-EGFR antibody by the specific activity of the reference FLAG-tagged anti-EGFR parental antibody. Table 16 sets forth the normalized specific activity of each identified variant set forth above at dilution 1 and dilution 2. The variant anti-EGFR antibodies with an NSA >0.4 at pH 6.0 and an NSA <0.4 at pH 7.4 were identified and selected for further analysis. The mutations of these identified antibodies are antibodies containing light chain (LC) mutations: L004C, L004V, S056H or N091V; and antibodies containing heavy chain (HC) mutations: V024I, V024L, S025C, S025G, S025I, S025Q, S025T, S025L, N031I, N031T, N031V, Y032seT, V050L, G054R, G054C, G054P, D058M, Y059E, F063R, F063C, F063G, F063M, F063V, T064N, T064V, S068F, S068Q, D072K, D072L, D072M, D072W, N073Q, S074H, S074R, S074D, S074G, S074Y, K075H, K075W, Q077R, Q077E, T100I, T100P, Y101W, Y104D, Y104F, Y104S or A107N.

TABLE 16
Normalized Specific Activity at pH 6.0 and pH 7.4 of Variant Anti-EGFR
Antibodies.

| | | Normalized Specific | | Normalized Specific | |
|---|---|---|---|---|---|
| | | Activity | | Activity | |
| | | (NSA) (pH 6.0) | | (NSA) (pH 7.4) | |
| Chain^{a} | Mutation | Dilution 1 | Dilution 2 | Dilution 1 | Dilution 2 |
| HC | T23K | 1.020 | 2.018 | 0.986 | 1.435 |
| HC | T23H | 1.889 | 5.343 | 1.940 | 3.453 |
| HC | T23R | 1.057 | 2.664 | 1.048 | 1.587 |
| HC | T23A | 1.238 | 2.459 | 1.304 | 1.297 |
| HC | T23C | 1.073 | 2.651 | 1.096 | 1.673 |
| HC | T23E | 1.255 | 2.947 | 1.406 | 1.751 |
| HC | T23G | 1.057 | 1.084 | 0.727 | 0.627 |
| HC | T23I | 1.097 | 2.851 | 1.126 | 1.975 |
| HC | T23M | 0.546 | 0.946 | 0.494 | 0.702 |
| HC | T23N | 1.062 | 2.207 | 0.888 | 1.504 |
| HC | T23P | 0.118 | 0.235 | 0.079 | 0.273 |
| HC | T23S | 0.750 | 2.908 | 1.087 | 1.902 |
| HC | T23V | 0.117 | 0.329 | 0.097 | 0.290 |
| HC | T23W | 3.143 | 5.871 | 2.981 | 2.441 |
| HC | T23L | 3.495 | 3.868 | 2.889 | 2.277 |
| HC | V24R | 0.103 | 0.096 | 0.092 | 0.413 |
| HC | V24A | 0.600 | 0.307 | 0.439 | 0.525 |
| HC | V24F | 0.861 | 0.233 | 0.428 | 0.622 |
| HC | V24G | 0.525 | 0.323 | 0.461 | 0.614 |
| HC | V24I | 1.049 | 0.305 | 0.381 | 0.568 |
| HC | V24M | 1.007 | 0.348 | 0.490 | 0.653 |
| HC | V24P | 2.209 | 0.566 | 0.766 | 1.234 |
| HC | V24S | 0.657 | 0.337 | 0.460 | 0.581 |
| HC | V24T | 1.001 | 0.315 | 0.430 | 0.543 |
| HC | V24L | 0.551 | 0.176 | 0.145 | 0.245 |
| HC | S25H | 0.389 | 0.227 | 0.167 | 0.207 |
| HC | S25R | 0.397 | 0.175 | 0.237 | 0.255 |
| HC | S25A | 0.344 | 0.239 | 0.238 | 0.310 |
| HC | S25C | 0.564 | 0.262 | 0.365 | 0.423 |
| HC | S25D | 0.364 | 0.203 | 0.267 | 0.351 |
| HC | S25E | 0.365 | 0.142 | 0.321 | 0.400 |
| HC | S25F | 0.350 | 0.196 | 0.323 | 0.450 |
| HC | S25G | 0.573 | 0.237 | 0.228 | 0.317 |
| HC | S25I | 0.556 | 0.397 | 0.374 | 0.464 |
| HC | S25M | 0.320 | 0.248 | 0.288 | 0.394 |
| HC | S25P | 2.362 | 0.630 | 0.673 | 1.444 |
| HC | S25Q | 1.319 | 0.347 | 0.335 | 0.493 |
| HC | S25T | 0.648 | 0.118 | 0.353 | 0.192 |
| HC | S25V | 0.300 | 0.229 | 0.221 | 0.381 |
| HC | S25L | 0.504 | 0.283 | 0.267 | 0.361 |
| HC | G26H | 2.071 | 3.143 | 1.536 | 2.105 |
| HC | G26R | 1.821 | 2.842 | 1.633 | 1.911 |
| HC | G26D | 1.456 | 2.488 | 1.123 | 1.696 |
| HC | G26F | 0.672 | 1.242 | 0.444 | 0.925 |
| HC | G26M | 1.674 | 2.875 | 1.284 | 1.905 |
| HC | G26N | 0.705 | 2.325 | 0.858 | 1.765 |
| HC | G26P | 1.501 | 3.333 | 1.883 | 2.791 |
| HC | G26Q | 1.275 | 2.310 | 1.208 | 1.657 |
| HC | G26S | 1.298 | 2.234 | 1.322 | 1.625 |
| HC | G26Y | 1.638 | 2.491 | 1.170 | 1.692 |
| HC | G26L | 4.237 | 6.512 | 3.218 | 5.644 |
| HC | F27H | 1.267 | 0.291 | 0.713 | 1.059 |
| HC | F27R | 1.285 | 0.810 | 0.747 | 1.151 |
| HC | F27A | 0.643 | 0.485 | 0.504 | 0.864 |
| HC | F27D | 0.572 | 0.335 | 0.513 | 0.984 |
| HC | F27E | 0.500 | 0.234 | 0.444 | 0.836 |
| HC | F27G | 0.777 | 0.718 | 0.522 | 0.808 |
| HC | F27M | 0.723 | 0.304 | 0.501 | 0.512 |
| HC | F27P | 0.834 | 0.293 | 0.506 | 0.790 |
| HC | F27Q | 0.872 | 0.500 | 0.630 | 0.890 |
| HC | F27S | 1.248 | 0.334 | 0.620 | 0.852 |
| HC | F27T | 0.710 | 0.311 | 0.482 | 0.681 |
| HC | F27V | 1.758 | 0.882 | 0.781 | 1.205 |
| HC | F27W | 1.371 | 0.344 | 0.639 | 0.972 |
| HC | F27Y | 0.857 | 0.278 | 0.409 | 0.493 |
| HC | F27L | 0.813 | 0.256 | 0.523 | 0.800 |
| HC | S28K | 0.671 | 2.281 | 0.757 | 1.520 |
| HC | S28H | 1.188 | 2.106 | 0.969 | 1.332 |
| HC | S28R | 0.978 | 2.223 | 1.022 | 1.669 |
| HC | S28A | 1.412 | 2.739 | 1.162 | 1.534 |
| HC | S28D | 0.602 | 1.096 | 0.437 | 0.700 |
| HC | S28I | 1.363 | 3.128 | 1.289 | 1.859 |
| HC | S28M | 2.402 | 4.485 | 2.098 | 3.151 |
| HC | S28P | 1.701 | 3.628 | 1.498 | 2.339 |
| HC | S28Q | 1.048 | 2.480 | 1.030 | 1.642 |
| HC | S28V | 0.972 | 2.638 | 1.049 | 1.913 |
| HC | S28W | 0.814 | 2.190 | 0.823 | 1.423 |
| HC | S28L | 2.175 | 8.593 | 1.970 | 2.977 |
| HC | L29K | 0.392 | 1.111 | 0.282 | 0.698 |
| HC | L29H | 0.338 | 0.911 | 0.238 | 0.475 |
| HC | L29A | 1.181 | 2.332 | 1.142 | 1.769 |
| HC | L29D | 0.388 | 0.893 | 0.359 | 0.897 |
| HC | L29G | 2.475 | 3.360 | 2.240 | 3.922 |
| HC | L29I | 0.406 | 1.498 | 0.517 | 1.142 |
| HC | L29M | 1.067 | 2.477 | 1.252 | 2.170 |
| HC | L29N | 0.845 | 3.909 | 0.860 | 1.538 |
| HC | L29S | 0.684 | 1.545 | 0.497 | 1.088 |
| HC | L29V | 0.352 | 0.930 | 0.278 | 0.735 |
| HC | T30H | 1.092 | 2.120 | 1.109 | 1.430 |
| HC | T30R | 0.592 | 1.454 | 0.718 | 0.994 |
| HC | T30D | 1.159 | 2.336 | 1.122 | 1.588 |
| HC | T30G | 0.749 | 1.508 | 0.822 | 1.140 |
| HC | T30I | 1.025 | 2.917 | 1.082 | 1.502 |
| HC | T30M | 0.700 | 1.280 | 0.797 | 0.834 |
| HC | T30N | 1.065 | 1.917 | 1.093 | 1.311 |
| HC | T30P | 1.064 | 1.607 | 0.996 | 1.397 |
| HC | T30S | 0.786 | 1.636 | 0.929 | 1.233 |
| HC | T30V | 0.728 | 1.567 | 0.912 | 0.991 |
| HC | T30W | 1.003 | 1.900 | 0.927 | 1.169 |
| HC | T30Y | 0.708 | 1.688 | 0.797 | 1.561 |
| HC | N31K | 0.352 | 0.248 | 0.253 | 0.400 |
| HC | N31H | 0.317 | 0.212 | 0.201 | 0.280 |
| HC | N31D | 0.794 | 0.331 | 0.483 | 0.587 |
| HC | N31E | 0.203 | 0.184 | 0.173 | 0.517 |
| HC | N31G | 0.506 | 0.301 | 0.414 | 0.613 |
| HC | N31I | 0.933 | 0.303 | 0.333 | 0.435 |
| HC | N31T | 0.503 | 0.125 | 0.370 | 0.472 |
| HC | N31V | 0.763 | 0.281 | 0.318 | 0.197 |
| HC | N31L | 0.659 | 0.222 | 0.461 | 0.665 |
| HC | Y32H | 0.609 | 1.470 | 0.552 | 1.002 |
| HC | Y32R | 0.943 | 1.707 | 1.059 | 1.413 |
| HC | Y32C | 0.703 | 1.348 | 0.573 | 1.284 |
| HC | Y32M | 0.878 | 1.559 | 0.859 | 1.345 |
| HC | Y32N | 0.500 | 1.335 | 0.420 | 0.483 |
| HC | Y32T | 0.455 | 0.953 | 0.376 | 0.759 |
| HC | Y32V | 0.742 | 1.043 | 0.672 | 1.448 |
| HC | Y32L | 1.385 | 2.612 | 1.287 | 1.974 |
| HC | G33E | 1.207 | 2.300 | 0.931 | 0.950 |
| HC | G33M | 2.556 | 3.457 | 1.992 | 2.807 |
| HC | G33S | 0.801 | 3.041 | 0.790 | 2.418 |
| HC | G33T | 1.148 | 1.830 | 0.970 | 1.767 |
| HC | G33Y | 1.133 | 4.983 | 1.165 | 4.590 |
| HC | V34A | 2.444 | 4.254 | 1.716 | 3.125 |
| HC | V34C | 0.372 | 1.062 | 0.558 | 0.573 |
| HC | V34I | 1.073 | 2.295 | 1.141 | 1.650 |
| HC | V34M | 0.434 | 1.212 | 0.467 | 0.835 |
| HC | V34P | 0.692 | 3.135 | 0.920 | 1.994 |
| HC | V34L | 1.696 | 3.294 | 1.682 | 2.238 |
| HC | H35I | 2.905 | 96.092 | 3.285 | 16.573 |
| HC | H35Q | 4.926 | 6.014 | 3.510 | 6.052 |
| HC | W36K | 0.617 | 2.808 | 0.790 | 1.992 |
| HC | W36A | 2.841 | 4.005 | 2.076 | 3.920 |
| HC | W36I | 0.588 | 1.638 | 0.729 | 1.452 |
| HC | W36V | 0.864 | 2.274 | 1.114 | 1.961 |
| HC | W36Y | 1.484 | 2.844 | 1.570 | 2.454 |
| HC | V50K | 0.043 | 0.244 | 0.042 | 0.212 |
| HC | V50H | 1.916 | 3.631 | 1.774 | 2.742 |
| HC | V50A | 1.390 | 3.507 | 1.143 | 2.243 |
| HC | V50D | 1.070 | 1.811 | 0.702 | 1.284 |
| HC | V50E | 1.239 | 2.253 | 1.061 | 2.100 |
| HC | V50G | 0.844 | 1.656 | 0.669 | 1.261 |
| HC | V50I | 4.049 | 5.405 | 1.466 | 2.398 |
| HC | V50N | 1.053 | 1.512 | 0.471 | 0.700 |
| HC | V50Q | 2.666 | 4.891 | 1.815 | 2.384 |
| HC | V50T | 0.738 | 3.047 | 0.743 | 2.675 |
| HC | V50L | 0.440 | 0.735 | 0.191 | 0.205 |
| HC | I51K | 2.359 | 4.025 | 1.370 | 1.844 |
| HC | I51H | 3.723 | 14.555 | 1.822 | 2.338 |
| HC | I51A | 1.534 | 2.984 | 0.736 | 0.886 |
| HC | I51C | 1.765 | 2.990 | 0.932 | 1.094 |
| HC | I51E | 3.724 | 5.988 | 2.106 | 3.947 |
| HC | I51G | 5.223 | 8.038 | 1.801 | 3.716 |
| HC | I51N | 2.514 | 3.995 | 1.257 | 1.529 |
| HC | I51Q | 0.877 | 2.625 | 0.777 | 1.184 |
| HC | I51S | 1.255 | 2.857 | 0.936 | 1.196 |
| HC | I51V | 0.562 | 2.392 | 0.568 | 1.375 |
| HC | I51Y | 5.123 | 7.721 | 3.253 | 5.278 |
| HC | I51L | 0.874 | 3.046 | 0.818 | 1.280 |
| HC | W52I | 0.965 | 1.402 | 0.751 | 1.419 |
| HC | W52N | 0.592 | 1.877 | 0.774 | 1.549 |
| HC | W52Y | 0.981 | 3.959 | 1.220 | 2.463 |
| HC | S53H | 0.417 | 1.759 | 0.410 | 1.184 |
| HC | S53R | 1.583 | 2.285 | 1.370 | 1.749 |
| HC | S53A | 0.348 | 1.680 | 0.344 | 1.338 |
| HC | S53C | 0.908 | 2.714 | 0.953 | 2.487 |
| HC | S53G | 0.223 | 1.081 | 0.225 | 0.949 |
| HC | S53I | 0.384 | 1.723 | 0.382 | 1.274 |
| HC | S53M | 1.206 | 3.172 | 1.147 | 1.947 |
| HC | S53P | 0.669 | 2.501 | 0.662 | 1.757 |
| HC | S53Q | 1.381 | 2.721 | 0.940 | 0.979 |
| HC | S53L | 0.900 | 3.262 | 0.910 | 2.425 |
| HC | S53T | 0.419 | 1.674 | 0.450 | 0.671 |
| HC | S53V | 0.545 | 1.894 | 0.552 | 1.373 |
| HC | S53Y | 0.344 | 1.426 | 0.334 | 1.031 |
| HC | G54H | 0.543 | 0.241 | 0.445 | 0.850 |
| HC | G54R | 0.462 | 0.148 | 0.345 | 0.524 |
| HC | G54A | 0.304 | 0.185 | 0.268 | 0.519 |
| HC | G54C | 0.567 | 0.120 | 0.375 | 0.423 |
| HC | G54D | 0.377 | 0.163 | 0.279 | 0.387 |
| HC | G54P | 0.530 | 0.175 | 0.307 | 0.430 |
| HC | G54S | 0.376 | 0.106 | 0.195 | 0.341 |
| HC | G55H | 0.391 | 1.139 | 0.590 | 0.968 |
| HC | G55R | 0.342 | 1.464 | 0.563 | 1.211 |
| HC | G55M | 0.338 | 0.797 | 0.509 | 0.715 |
| HC | G55S | 0.335 | 0.715 | 0.480 | 0.548 |
| HC | G55Y | 0.530 | 0.664 | 0.472 | 0.679 |
| HC | N56K | 0.782 | 1.706 | 0.754 | 1.399 |
| HC | N56A | 1.330 | 2.417 | 0.785 | 0.816 |
| HC | N56P | 4.302 | 21.666 | 2.925 | 3.906 |
| HC | N56S | 1.096 | 2.358 | 0.854 | 1.178 |
| HC | N56V | 0.938 | 1.863 | 0.843 | 1.374 |
| HC | N56G | 1.586 | 2.626 | 0.854 | 1.056 |
| HC | T57H | 1.322 | 2.243 | 0.789 | 1.007 |
| HC | T57R | 0.609 | 1.872 | 0.571 | 1.152 |
| HC | T57L | 0.795 | 2.304 | 0.711 | 1.287 |
| HC | T57A | 0.913 | 3.028 | 0.822 | 1.533 |
| HC | T57C | 0.868 | 2.235 | 0.729 | 1.097 |
| HC | T57D | 2.819 | 3.335 | 1.244 | 1.571 |
| HC | T57F | 0.477 | 1.873 | 0.446 | 1.312 |
| HC | T57M | 1.025 | 2.955 | 0.931 | 0.830 |
| HC | T57N | 1.244 | 2.328 | 0.872 | 1.091 |
| HC | T57Q | 1.019 | 2.576 | 0.859 | 1.226 |
| HC | T57W | 0.744 | 1.996 | 0.636 | 0.832 |
| HC | T57Y | 0.572 | 1.829 | 0.528 | 1.233 |
| HC | D58L | 0.494 | 1.142 | 0.642 | 0.909 |
| HC | D58G | 0.733 | 1.998 | 0.620 | 1.097 |
| HC | D58M | 0.527 | 0.975 | 0.380 | 0.687 |
| HC | D58N | 0.602 | 1.969 | 0.544 | 1.330 |
| HC | D58Q | 0.879 | 1.255 | 0.450 | 0.681 |
| HC | Y59H | 0.664 | 1.120 | 0.711 | 0.837 |
| HC | Y59R | 0.317 | 0.937 | 0.491 | 0.829 |
| HC | Y59A | 0.688 | 0.847 | 0.504 | 0.670 |
| HC | Y59C | 0.581 | 0.976 | 0.673 | 0.791 |
| HC | Y59D | 2.044 | 2.694 | 1.189 | 2.433 |
| HC | Y59E | 0.618 | 1.008 | 0.525 | 0.351 |
| HC | Y59G | 0.337 | 1.012 | 0.511 | 0.905 |
| HC | Y59I | 0.334 | 1.053 | 0.422 | 0.955 |
| HC | Y59P | 3.607 | 5.871 | 1.953 | 7.045 |
| HC | Y59Q | 0.438 | 1.039 | 0.583 | 0.710 |
| HC | Y59S | 0.340 | 0.895 | 0.514 | 0.731 |
| HC | Y59T | 0.395 | 1.082 | 0.567 | 0.770 |
| HC | Y59V | 0.559 | 1.032 | 0.625 | 0.773 |
| HC | Y59W | 0.488 | 1.054 | 0.600 | 0.712 |
| HC | N60K | 0.456 | 1.285 | 0.595 | 1.149 |
| HC | N60A | 0.432 | 1.286 | 0.646 | 1.134 |
| HC | N60C | 1.097 | 1.578 | 1.054 | 1.345 |
| HC | N60D | 2.085 | 42.638 | 2.049 | 8.023 |
| HC | N60F | 0.656 | 1.286 | 0.634 | 0.929 |
| HC | N60G | 0.669 | 1.192 | 0.660 | 0.873 |
| HC | N60P | 1.643 | 2.562 | 1.066 | 2.171 |
| HC | N60Q | 0.967 | 1.396 | 0.871 | 1.282 |
| HC | N60S | 0.722 | 1.169 | 0.631 | 0.853 |
| HC | N60T | 0.607 | 1.193 | 0.715 | 0.973 |
| HC | N60Y | 0.514 | 1.166 | 0.739 | 1.038 |
| HC | T61N | 0.436 | 1.348 | 0.634 | 1.140 |
| HC | T61Q | 0.719 | 1.201 | 0.766 | 0.524 |
| HC | P62G | 0.674 | 1.312 | 0.780 | 1.123 |
| HC | F63H | 0.498 | 0.315 | 0.438 | 0.624 |
| HC | F63R | 0.877 | 0.251 | 0.362 | 0.490 |
| HC | F63L | 0.736 | 0.375 | 0.532 | 0.752 |
| HC | F63A | 0.956 | 0.299 | 0.418 | 0.540 |
| HC | F63C | 1.107 | 0.294 | 0.339 | 0.699 |
| HC | F63D | 0.865 | 0.370 | 0.547 | 0.678 |
| HC | F63G | 0.746 | 0.280 | 0.398 | 0.527 |
| HC | F63M | 0.490 | 0.243 | 0.347 | 0.367 |
| HC | F63N | 2.041 | 0.601 | 1.138 | 0.713 |
| HC | F63Q | 0.732 | 0.297 | 0.419 | 0.482 |
| HC | F63S | 0.352 | 0.123 | 0.188 | 0.101 |
| HC | F63V | 0.514 | 0.269 | 0.364 | 0.415 |
| HC | T64R | 0.182 | 0.570 | 0.297 | 0.474 |
| HC | T64L | 0.298 | 1.068 | 0.467 | 0.919 |
| HC | T64C | 0.516 | 1.008 | 0.703 | 0.933 |
| HC | T64F | 0.693 | 1.832 | 0.598 | 3.168 |
| HC | T64G | 0.172 | 0.535 | 0.284 | 0.451 |
| HC | T64N | 0.493 | 1.405 | 0.331 | 1.574 |
| HC | T64Q | 0.540 | 0.941 | 0.562 | 0.746 |
| HC | T64V | 0.299 | 0.675 | 0.374 | 0.238 |
| HC | S65H | 0.325 | 1.329 | 0.335 | 0.814 |
| HC | S65R | 0.396 | 1.420 | 0.395 | 0.663 |
| HC | S65L | 0.139 | 0.596 | 0.143 | 0.404 |
| HC | S65C | 0.585 | 2.535 | 0.557 | 1.236 |
| HC | S65E | 0.508 | 1.810 | 0.500 | 1.056 |
| HC | S65F | 0.452 | 1.653 | 0.440 | 1.031 |
| HC | S65G | 0.254 | 1.139 | 0.264 | 0.944 |
| HC | S65I | 0.558 | 1.828 | 0.539 | 1.062 |
| HC | S65M | 0.556 | 1.700 | 0.513 | 0.874 |
| HC | S65N | 0.483 | 1.706 | 0.454 | 0.825 |
| HC | S65P | 0.974 | 2.084 | 0.684 | 0.842 |
| HC | S65Q | 0.492 | 1.734 | 0.472 | 0.880 |
| HC | S65T | 0.680 | 1.921 | 0.615 | 1.012 |
| HC | S65W | 0.380 | 1.476 | 0.380 | 0.924 |
| HC | S65Y | 0.329 | 1.393 | 0.329 | 0.990 |
| HC | R66L | 0.671 | 1.783 | 0.588 | 0.671 |
| HC | R66A | 0.998 | 2.099 | 0.814 | 0.996 |
| HC | R66C | 1.915 | 3.034 | 0.953 | 1.308 |
| HC | R66E | 1.811 | 3.037 | 1.102 | 1.597 |
| HC | R66F | 1.562 | 1.318 | 0.751 | 0.814 |
| HC | R66N | 0.935 | 1.661 | 0.709 | 0.995 |
| HC | R66P | 0.974 | 1.756 | 0.631 | 1.267 |
| HC | R66Q | 0.852 | 2.010 | 0.669 | 0.999 |
| HC | R66S | 0.900 | 1.594 | 0.619 | 0.658 |
| HC | R66T | 0.877 | 1.430 | 0.463 | 0.871 |
| HC | R66V | 0.936 | 2.491 | 0.893 | 0.761 |
| HC | R66G | 2.068 | 2.616 | 0.897 | 1.132 |
| HC | L67A | 0.980 | 2.026 | 0.702 | 0.889 |
| HC | L67C | 0.634 | 1.857 | 0.545 | 0.697 |
| HC | L67D | 0.033 | 0.125 | 0.026 | 0.120 |
| HC | L67E | 1.164 | 2.276 | 0.819 | 1.129 |
| HC | L67I | 0.879 | 1.748 | 0.589 | 0.706 |
| HC | L67M | 0.953 | 2.144 | 0.719 | 0.955 |
| HC | L67Q | 1.865 | 2.571 | 0.940 | 1.249 |
| HC | L67S | 0.925 | 2.316 | 0.769 | 0.996 |
| HC | L67T | 1.099 | 2.115 | 0.667 | 0.765 |
| HC | L67V | 1.443 | 2.291 | 0.723 | 0.940 |
| HC | L67Y | 0.852 | 2.598 | 0.792 | 0.633 |
| HC | S68K | 0.351 | 1.123 | 0.329 | 0.607 |
| HC | S68H | 1.426 | 5.677 | 1.487 | 3.076 |
| HC | S68R | 0.352 | 1.259 | 0.340 | 0.643 |
| HC | S68L | 0.862 | 2.245 | 0.715 | 0.945 |
| HC | S68C | 0.340 | 1.251 | 0.340 | 0.675 |
| HC | S68D | 0.661 | 1.879 | 0.600 | 0.439 |
| HC | S68E | 0.443 | 1.435 | 0.418 | 0.710 |
| HC | S68F | 0.713 | 1.782 | 0.396 | 1.344 |
| HC | S68G | 0.704 | 1.879 | 0.573 | 0.969 |
| HC | S68I | 0.608 | 1.796 | 0.558 | 0.775 |
| HC | S68N | 0.456 | 1.188 | 0.414 | 0.580 |
| HC | S68Q | 0.138 | 0.444 | 0.135 | 0.238 |
| HC | S68T | 0.288 | 1.183 | 0.295 | 0.805 |
| HC | S68V | 0.494 | 1.355 | 0.440 | 0.629 |
| HC | I69A | 2.116 | 3.280 | 1.694 | 3.009 |
| HC | I69C | 0.977 | 1.481 | 1.075 | 1.235 |
| HC | I69G | 2.582 | 15.344 | 2.793 | 10.186 |
| HC | I69Y | 1.759 | 2.635 | 1.624 | 3.153 |
| HC | N70H | 1.429 | 3.411 | 0.909 | 1.563 |
| HC | N70R | 3.154 | 3.380 | 1.291 | 1.930 |
| HC | N70L | 1.429 | 3.144 | 1.023 | 1.394 |
| HC | N70D | 3.706 | 5.415 | 1.729 | 2.720 |
| HC | N70E | 1.457 | 3.831 | 1.105 | 1.664 |
| HC | N70F | 0.867 | 2.802 | 0.810 | 1.857 |
| HC | N70G | 1.321 | 3.008 | 1.064 | 1.522 |
| HC | N70I | 1.764 | 3.564 | 1.075 | 1.597 |
| HC | N70P | 1.315 | 15.234 | 2.622 | 8.199 |
| HC | N70Q | 1.347 | 3.162 | 1.011 | 1.838 |
| HC | N70S | 1.059 | 3.405 | 0.978 | 0.825 |
| HC | N70T | 1.246 | 3.260 | 0.987 | 1.481 |
| HC | N70V | 0.071 | 3.033 | 0.851 | 1.850 |
| HC | N70Y | 1.291 | 3.180 | 0.849 | 1.649 |
| HC | K71H | 1.177 | 2.348 | 0.919 | 1.275 |
| HC | K71R | 1.746 | 2.774 | 1.135 | 1.501 |
| HC | K71L | 1.026 | 2.924 | 0.942 | 2.108 |
| HC | K71A | 2.515 | 3.244 | 1.558 | 2.316 |
| HC | K71C | 1.157 | 3.410 | 0.947 | 1.926 |
| HC | K71F | 0.767 | 1.728 | 0.731 | 1.477 |
| HC | K71G | 1.641 | 2.750 | 1.201 | 1.536 |
| HC | K71Q | 1.185 | 2.462 | 1.039 | 2.148 |
| HC | K71S | 1.258 | 2.360 | 1.046 | 1.419 |
| HC | K71T | 1.657 | 2.713 | 1.128 | 0.999 |
| HC | K71V | 1.077 | 2.833 | 0.970 | 1.617 |
| HC | K71W | 0.961 | 2.491 | 0.899 | 1.878 |
| HC | K71Y | 0.777 | 2.371 | 0.690 | 1.677 |
| HC | D72K | 0.483 | 1.078 | 0.382 | 1.374 |
| HC | D72H | 0.610 | 1.573 | 0.529 | 0.685 |
| HC | D72R | 0.299 | 0.897 | 0.287 | 0.424 |
| HC | D72L | 0.353 | 1.304 | 0.166 | 0.308 |
| HC | D72A | 0.760 | 1.625 | 0.783 | 1.435 |
| HC | D72G | 1.060 | 1.912 | 0.631 | 0.854 |
| HC | D72I | 0.528 | 1.484 | 0.453 | 0.691 |
| HC | D72M | 0.444 | 1.080 | 0.393 | 0.444 |
| HC | D72N | 0.699 | 1.986 | 0.639 | 0.992 |
| HC | D72Q | 0.547 | 2.197 | 0.488 | 0.693 |
| HC | D72S | 0.552 | 1.649 | 0.537 | 0.821 |
| HC | D72V | 0.435 | 1.389 | 0.423 | 0.709 |
| HC | D72W | 0.537 | 1.453 | 0.213 | 0.314 |
| HC | D72Y | 0.566 | 1.469 | 0.454 | 0.642 |
| HC | N73H | 1.037 | 1.850 | 0.722 | 0.716 |
| HC | N73R | 0.877 | 1.547 | 0.531 | 0.590 |
| HC | N73L | 0.661 | 1.749 | 0.590 | 0.930 |
| HC | N73A | 1.179 | 1.975 | 0.526 | 0.777 |
| HC | N73C | 1.032 | 2.006 | 0.680 | 0.810 |
| HC | N73G | 0.960 | 1.702 | 0.622 | 0.834 |
| HC | N73I | 0.551 | 1.755 | 0.506 | 0.841 |
| HC | N73M | 0.809 | 1.639 | 0.483 | 0.649 |
| HC | N73P | 1.410 | 2.152 | 0.752 | 1.070 |
| HC | N73Q | 0.898 | 1.693 | 0.609 | 0.329 |
| HC | N73S | 1.138 | 2.107 | 0.762 | 0.943 |
| HC | N73T | 1.090 | 2.026 | 0.782 | 1.090 |
| HC | N73V | 1.339 | 1.945 | 0.743 | 0.963 |
| HC | N73W | 1.193 | 1.868 | 0.673 | 0.901 |
| HC | N73Y | 0.901 | 1.764 | 0.627 | 0.672 |
| HC | S74K | 0.672 | 1.141 | 0.430 | 0.471 |
| HC | S74H | 0.612 | 1.249 | 0.396 | 0.480 |
| HC | S74R | 0.538 | 1.169 | 0.395 | 0.455 |
| HC | S74L | 0.425 | 1.435 | 0.419 | 0.689 |
| HC | S74A | 0.672 | 1.191 | 0.454 | 0.527 |
| HC | S74C | 0.718 | 1.164 | 0.456 | 0.464 |
| HC | S74D | 0.522 | 1.199 | 0.353 | 0.419 |
| HC | S74E | 0.729 | 1.554 | 0.545 | 0.546 |
| HC | S74G | 0.570 | 2.236 | 0.346 | 0.433 |
| HC | S74I | 0.648 | 1.174 | 0.473 | 0.544 |
| HC | S74M | 0.658 | 1.228 | 0.466 | 0.494 |
| HC | S74P | 0.566 | 1.369 | 0.449 | 0.552 |
| HC | S74T | 0.559 | 1.281 | 0.456 | 0.542 |
| HC | S74V | 0.386 | 1.147 | 0.391 | 0.548 |
| HC | S74Y | 0.692 | 1.191 | 0.394 | 0.414 |
| HC | K75H | 0.447 | 1.338 | 0.396 | 0.256 |
| HC | K75R | 0.688 | 1.393 | 0.451 | 0.537 |
| HC | K75L | 0.555 | 1.058 | 0.407 | 0.620 |
| HC | K75A | 0.732 | 1.360 | 0.475 | 0.550 |
| HC | K75C | 0.915 | 1.617 | 0.477 | 0.552 |
| HC | K75E | 0.791 | 1.535 | 0.527 | 0.683 |
| HC | K75F | 0.709 | 1.374 | 0.406 | 0.453 |
| HC | K75M | 0.841 | 1.338 | 0.412 | 0.555 |
| HC | K75Q | 0.611 | 1.463 | 0.448 | 0.508 |
| HC | K75T | 0.836 | 1.280 | 0.452 | 0.561 |
| HC | K75V | 1.060 | 1.712 | 0.530 | 0.599 |
| HC | K75W | 0.932 | 1.398 | 0.390 | 0.498 |
| HC | K75Y | 0.670 | 1.338 | 0.401 | 0.450 |
| HC | S76H | 1.102 | 1.634 | 0.544 | 0.615 |
| HC | S76R | 0.960 | 1.737 | 0.498 | 0.554 |
| HC | S76L | 1.414 | 1.615 | 0.543 | 0.704 |
| HC | S76A | 0.658 | 1.242 | 0.423 | 0.743 |
| HC | S76C | 1.207 | 2.072 | 0.640 | 0.831 |
| HC | S76D | 1.224 | 4.313 | 0.577 | 0.655 |
| HC | S76E | 1.121 | 2.268 | 0.704 | 0.849 |
| HC | S76F | 0.877 | 1.662 | 0.577 | 0.652 |
| HC | S76M | 0.841 | 1.815 | 0.558 | 0.665 |
| HC | S76P | 1.362 | 2.185 | 0.637 | 0.782 |
| HC | S76Q | 1.035 | 1.633 | 0.619 | 0.824 |
| HC | S76T | 1.702 | 2.724 | 0.810 | 0.918 |
| HC | S76Y | 1.264 | 2.087 | 0.639 | 0.788 |
| HC | Q77H | 0.760 | 1.558 | 0.588 | 0.785 |
| HC | Q77R | 0.480 | 1.093 | 0.369 | 0.577 |
| HC | Q77L | 1.600 | 2.089 | 0.673 | 0.839 |
| HC | Q77A | 0.869 | 1.914 | 0.656 | 0.753 |
| HC | Q77E | 0.684 | 1.794 | 0.598 | 0.362 |
| HC | Q77G | 1.626 | 2.074 | 0.646 | 0.826 |
| HC | Q077I | 1.339 | 1.978 | 0.608 | 0.745 |
| HC | Q77M | 0.987 | 1.708 | 0.487 | 0.579 |
| HC | Q77N | 1.063 | 2.097 | 0.646 | 0.845 |
| HC | Q77S | 0.792 | 1.539 | 0.556 | 0.712 |
| HC | Q77V | 0.701 | 1.773 | 0.595 | 0.692 |
| HC | Q77W | 1.272 | 1.805 | 0.600 | 0.828 |
| HC | Q77Y | 0.967 | 1.351 | 0.525 | 0.599 |
| HC | Y93H | 2.932 | 5.071 | 2.461 | 5.308 |
| HC | Y93V | 1.325 | 2.246 | 1.209 | 2.162 |
| HC | Y93W | 1.070 | 2.602 | 0.969 | 3.648 |
| HC | Y94R | 0.194 | 0.808 | 0.302 | 0.665 |
| HC | Y94L | 0.509 | 1.104 | 0.427 | 1.011 |
| HC | R97H | 0.853 | 1.644 | 0.638 | 1.390 |
| HC | R97W | 0.106 | 0.509 | 0.195 | 0.417 |
| HC | A98P | 0.284 | 1.092 | 0.265 | 0.824 |
| HC | L99N | 0.368 | 1.014 | 0.319 | 0.975 |
| HC | L99W | 0.259 | 1.101 | 0.291 | 0.550 |
| HC | T100H | 0.350 | 1.194 | 0.345 | 1.092 |
| HC | T100L | 0.545 | 1.609 | 0.463 | 1.172 |
| HC | T100A | 0.600 | 2.227 | 0.557 | 1.628 |
| HC | T100D | 0.551 | 0.846 | 0.507 | 0.802 |
| HC | T100I | 0.510 | 1.480 | 0.382 | 1.194 |
| HC | T100N | 0.535 | 1.642 | 0.500 | 1.166 |
| HC | T100P | 0.341 | 0.526 | 0.108 | 0.246 |
| HC | T100Q | 0.521 | 1.617 | 0.504 | 1.373 |
| HC | T100S | 0.441 | 1.218 | 0.408 | 0.564 |
| HC | T100V | 0.651 | 1.967 | 0.553 | 1.302 |
| HC | T100Y | 0.724 | 1.533 | 0.607 | 1.150 |
| HC | Y101H | 0.251 | 1.091 | 0.244 | 0.826 |
| HC | Y101E | 0.016 | 0.072 | 0.017 | 0.036 |
| HC | Y101F | 1.117 | 1.976 | 0.681 | 0.890 |
| HC | Y101M | 0.523 | 1.534 | 0.488 | 1.328 |
| HC | Y101W | 0.424 | 1.078 | 0.399 | 0.491 |
| HC | Y102R | 0.025 | 0.116 | 0.020 | 0.103 |
| HC | Y102C | 0.020 | 0.084 | 0.017 | 0.086 |
| HC | Y102D | 0.018 | 0.081 | 0.016 | 0.076 |
| HC | Y102I | 0.017 | 0.072 | 0.013 | 0.065 |
| HC | Y102N | 0.017 | 0.072 | 0.013 | 0.066 |
| HC | Y102W | 0.627 | 1.446 | 0.551 | 0.956 |
| HC | D103R | 0.014 | 0.050 | 0.012 | 0.053 |
| HC | D103L | 0.017 | 0.100 | 0.018 | 0.035 |
| HC | D103A | 0.669 | 0.302 | 0.604 | 1.536 |
| HC | D103C | 0.015 | 0.078 | 0.015 | 0.071 |
| HC | D103I | 0.158 | 0.657 | 0.124 | 0.648 |
| HC | D103P | 0.016 | 0.084 | 0.017 | 0.072 |
| HC | D103Q | 0.544 | 1.768 | 0.522 | 1.441 |
| HC | D103Y | 0.016 | 0.085 | 0.016 | 0.075 |
| HC | Y104H | 0.244 | 0.833 | 0.205 | 0.699 |
| HC | Y104L | 0.496 | 1.289 | 0.439 | 0.931 |
| HC | Y104D | 0.159 | 0.539 | 0.099 | 0.306 |
| HC | Y104F | 0.414 | 1.495 | 0.331 | 0.910 |
| HC | Y104I | 0.283 | 0.616 | 0.237 | 0.555 |
| HC | Y104M | 0.157 | 0.648 | 0.133 | 0.503 |
| HC | Y104S | 0.119 | 0.447 | 0.068 | 0.227 |
| HC | Y104V | 0.091 | 0.376 | 0.080 | 0.269 |
| HC | E105H | 0.149 | 0.720 | 0.226 | 0.555 |
| HC | E105T | 0.185 | 0.550 | 0.194 | 0.498 |
| HC | F106L | 0.266 | 0.740 | 0.253 | 0.636 |
| HC | F106V | 0.492 | 0.889 | 0.455 | 1.165 |
| HC | F106W | 0.537 | 0.997 | 0.575 | 0.879 |
| HC | F106Y | 0.579 | 1.578 | 0.889 | 1.385 |
| HC | A107K | 0.207 | 0.617 | 0.309 | 0.549 |
| HC | A107H | 0.182 | 0.624 | 0.280 | 0.541 |
| HC | A107R | 0.354 | 1.088 | 0.468 | 0.977 |
| HC | A107L | 0.552 | 1.866 | 0.546 | 0.774 |
| HC | A107C | 0.208 | 0.552 | 0.253 | 0.483 |
| HC | A107D | 0.237 | 0.604 | 0.225 | 0.520 |
| HC | A107E | 0.512 | 1.843 | 0.592 | 1.422 |
| HC | A107G | 0.263 | 0.877 | 0.321 | 0.738 |
| HC | A107N | 0.146 | 0.419 | 0.236 | 0.360 |
| HC | A107S | 0.258 | 0.818 | 0.428 | 0.720 |
| HC | A107T | 0.460 | 1.239 | 0.528 | 1.110 |
| HC | A107Y | 0.457 | 1.340 | 0.577 | 1.086 |
| HC | Y108K | 0.716 | 1.023 | 0.531 | 0.886 |
| HC | Y108H | 0.426 | 1.161 | 0.518 | 0.970 |
| HC | Y108R | 1.797 | 3.006 | 1.473 | 2.831 |
| HC | Y108L | 0.578 | 1.209 | 0.600 | 0.871 |
| HC | Y108C | 0.538 | 1.044 | 0.497 | 0.879 |
| HC | Y108F | 0.491 | 1.507 | 0.688 | 1.240 |
| HC | Y108I | 0.023 | 0.053 | 0.025 | 0.042 |
| HC | Y108N | 0.582 | 1.362 | 0.535 | 1.072 |
| HC | Y108S | 0.620 | 1.458 | 0.601 | 1.018 |
| HC | Y108T | 0.487 | 1.104 | 0.458 | 0.755 |
| HC | Y108V | 0.730 | 1.321 | 0.592 | 1.263 |
| HC | Y108W | 0.559 | 1.422 | 0.539 | 1.004 |
| HC | W109I | 1.412 | 2.041 | 1.112 | 1.788 |
| HC | W109M | 0.718 | 1.364 | 0.823 | 1.101 |
| HC | W109Y | 1.076 | 1.749 | 0.989 | 1.472 |
| HC | G110R | 1.165 | 5.194 | 1.833 | 4.433 |
| HC | G110A | 0.720 | 1.560 | 0.838 | 1.427 |
| HC | G110M | 3.249 | 11.020 | 2.455 | 14.823 |
| HC | G110P | 2.292 | 4.834 | 1.970 | 5.395 |
| HC | G110T | 1.168 | 1.938 | 1.149 | 1.733 |
| HC | Q111K | 0.603 | 1.796 | 0.568 | 1.108 |
| HC | Q111H | 2.478 | 3.661 | 1.487 | 1.909 |
| HC | Q111R | 1.220 | 2.302 | 0.870 | 1.091 |
| HC | Q111L | 1.349 | 2.631 | 0.999 | 1.282 |
| HC | Q111D | 1.207 | 2.244 | 0.889 | 1.094 |
| HC | Q111E | 1.067 | 2.588 | 0.869 | 1.163 |
| HC | Q111G | 1.342 | 2.672 | 1.033 | 1.386 |
| HC | Q111M | 2.871 | 3.716 | 1.426 | 0.855 |
| HC | Q111P | 2.397 | 3.826 | 1.384 | 1.795 |
| HC | Q111S | 1.171 | 2.598 | 0.974 | 1.227 |
| HC | Q111T | 0.760 | 2.478 | 0.678 | 1.274 |
| HC | Q111W | 1.646 | 2.561 | 0.994 | 1.186 |
| HC | Q111Y | 1.385 | 2.843 | 1.005 | 1.343 |
| HC | G112A | 2.121 | 2.898 | 1.723 | 2.371 |
| HC | G112N | 1.740 | 12.480 | 1.841 | 5.701 |
| HC | G112P | 1.475 | 2.338 | 1.641 | 2.080 |
| HC | G112S | 1.962 | 2.630 | 1.832 | 2.422 |
| HC | G112T | 2.850 | 6.175 | 2.537 | 7.080 |
| HC | G112Y | 2.473 | 5.622 | 2.147 | 6.430 |
| LC | D1W | 0.388 | 1.173 | 0.590 | 0.657 |
| LC | I2C | 0.739 | 2.597 | 0.981 | 1.004 |
| LC | I2V | 0.616 | 1.321 | 0.793 | 1.102 |
| LC | I2W | 0.715 | 0.885 | 0.844 | 0.427 |
| LC | L3D | 0.755 | 1.080 | 0.632 | 0.979 |
| LC | L3F | 0.811 | 1.170 | 0.629 | 1.131 |
| LC | L3G | 0.362 | 1.254 | 0.608 | 0.408 |
| LC | L3S | 0.668 | 0.872 | 0.578 | 0.833 |
| LC | L3T | 0.914 | 1.597 | 1.219 | 1.265 |
| LC | L3V | 0.968 | 1.999 | 1.315 | 0.949 |
| LC | L3W | 1.668 | 2.322 | 1.500 | 1.892 |
| LC | L3Y | 0.690 | 1.223 | 0.911 | 1.106 |
| LC | L3R | 0.337 | 1.002 | 0.597 | 0.733 |
| LC | L4C | 0.417 | 0.578 | 0.364 | 0.611 |
| LC | L4E | 1.177 | 1.636 | 1.114 | 1.502 |
| LC | L4F | 0.386 | 0.568 | 0.324 | 0.660 |
| LC | L4I | 0.508 | 0.738 | 0.517 | 0.661 |
| LC | L4P | 3.143 | 4.380 | 2.872 | 4.720 |
| LC | L4S | 0.594 | 0.862 | 0.518 | 0.975 |
| LC | L4T | 0.725 | 0.992 | 0.610 | 0.921 |
| LC | L4V | 0.444 | 0.613 | 0.371 | 0.275 |
| LC | L4W | 1.436 | 1.865 | 1.193 | 2.067 |
| LC | L4K | 2.048 | 2.777 | 1.767 | 2.957 |
| LC | L4H | 1.617 | 2.059 | 1.191 | 2.088 |
| LC | L4R | 1.694 | 2.439 | 1.489 | 2.087 |
| LC | T5A | 0.810 | 2.769 | 1.000 | 1.025 |
| LC | T5C | 1.935 | 2.614 | 1.631 | 2.098 |
| LC | T5D | 0.392 | 0.701 | 0.528 | 0.541 |
| LC | T5E | 0.508 | 1.285 | 0.936 | 1.092 |
| LC | T5F | 0.716 | 1.325 | 1.017 | 1.137 |
| LC | T5G | 0.756 | 1.267 | 1.011 | 1.058 |
| LC | T5N | 0.410 | 0.796 | 0.630 | 0.665 |
| LC | T5P | 0.296 | 0.440 | 0.308 | 0.450 |
| LC | T5S | 0.722 | 1.303 | 0.889 | 0.999 |
| LC | T5W | 0.866 | 1.382 | 0.972 | 1.055 |
| LC | T5L | 0.400 | 1.004 | 0.758 | 0.910 |
| LC | T5K | 0.652 | 1.202 | 0.909 | 1.026 |
| LC | T5H | 0.731 | 1.518 | 0.949 | 1.008 |
| LC | T5R | 0.436 | 1.099 | 0.665 | 0.769 |
| LC | R24A | 0.260 | 0.831 | 0.507 | 0.754 |
| LC | R24C | 1.592 | 2.429 | 1.766 | 2.150 |
| LC | R24F | 0.785 | 1.386 | 1.015 | 1.159 |
| LC | R24L | 0.494 | 1.508 | 0.974 | 1.393 |
| LC | R24M | 0.401 | 1.490 | 0.794 | 0.852 |
| LC | R24S | 0.968 | 1.941 | 1.399 | 1.573 |
| LC | R24W | 1.050 | 1.704 | 1.259 | 1.476 |
| LC | R24Y | 0.379 | 0.974 | 0.717 | 0.880 |
| LC | A25C | 1.571 | 2.505 | 2.125 | 2.024 |
| LC | A25G | 1.487 | 3.471 | 2.526 | 3.021 |
| LC | A25L | 2.166 | 2.983 | 2.459 | 2.496 |
| LC | A25V | 1.278 | 5.119 | 1.608 | 2.168 |
| LC | S26A | 0.864 | 1.323 | 0.863 | 1.156 |
| LC | S26C | 2.409 | 2.992 | 1.848 | 2.805 |
| LC | S26D | 1.717 | 10.871 | 1.367 | 2.694 |
| LC | S26I | 1.494 | 2.221 | 1.563 | 2.043 |
| LC | S26M | 1.137 | 1.543 | 0.969 | 1.392 |
| LC | S26N | 1.285 | 2.593 | 1.655 | 1.947 |
| LC | S26V | 1.567 | 2.436 | 1.269 | 2.357 |
| LC | S26W | 1.334 | 1.853 | 1.024 | 1.689 |
| LC | S26L | 1.073 | 1.903 | 1.219 | 1.668 |
| LC | S26G | 1.112 | 2.334 | 1.308 | 1.734 |
| LC | S26H | 0.557 | 1.482 | 0.924 | 1.348 |
| LC | S26R | 0.922 | 1.639 | 0.841 | 2.244 |
| LC | Q27A | 0.440 | 1.468 | 0.643 | 1.199 |
| LC | Q27D | 0.347 | 1.129 | 0.533 | 0.956 |
| LC | Q27E | 0.460 | 1.279 | 0.695 | 0.977 |
| LC | Q27F | 0.724 | 1.673 | 1.017 | 1.339 |
| LC | Q27I | 0.700 | 2.265 | 0.941 | 1.973 |
| LC | Q27M | 0.463 | 1.487 | 0.612 | 1.129 |
| LC | Q27N | 0.496 | 1.556 | 0.737 | 1.404 |
| LC | Q27P | 0.890 | 3.095 | 1.342 | 2.384 |
| LC | Q27T | 0.273 | 1.106 | 0.411 | 0.606 |
| LC | S28A | 0.930 | 1.472 | 0.889 | 1.193 |
| LC | S28D | 0.395 | 1.247 | 0.542 | 1.096 |
| LC | S28N | 0.233 | 1.039 | 0.411 | 0.749 |
| LC | S28Q | 0.350 | 0.696 | 0.466 | 0.547 |
| LC | S28L | 0.901 | 1.246 | 0.822 | 1.048 |
| LC | S28K | 0.753 | 1.147 | 0.855 | 1.056 |
| LC | S28H | 0.622 | 1.213 | 0.799 | 0.900 |
| LC | I29A | 0.426 | 1.249 | 0.570 | 1.137 |
| LC | I29E | 2.165 | 4.067 | 1.903 | 3.483 |
| LC | I29F | 1.438 | 2.842 | 1.628 | 2.610 |
| LC | I29S | 0.742 | 2.224 | 0.741 | 1.306 |
| LC | I29T | 0.575 | 1.496 | 0.733 | 1.260 |
| LC | I29R | 0.172 | 10.634 | 0.669 | 1.587 |
| LC | G30A | 0.643 | 1.440 | 0.851 | 1.236 |
| LC | G30E | 0.606 | 1.900 | 0.898 | 1.678 |
| LC | G30F | 0.938 | 1.806 | 1.064 | 1.232 |
| LC | G30I | 2.886 | 6.582 | 3.948 | 5.708 |
| LC | G30M | 0.594 | 1.535 | 0.819 | 1.364 |
| LC | G30P | 2.033 | 3.978 | 2.296 | 3.399 |
| LC | G30Q | 0.691 | 1.394 | 0.895 | 1.202 |
| LC | G30S | 0.885 | 2.369 | 1.126 | 1.755 |
| LC | G30V | 2.228 | 3.868 | 2.118 | 2.908 |
| LC | G30Y | 0.770 | 1.069 | 0.630 | 0.675 |
| LC | G30L | 1.918 | 4.755 | 2.578 | 1.786 |
| LC | G30K | 0.924 | 1.590 | 0.924 | 1.059 |
| LC | G30H | 0.649 | 1.224 | 0.809 | 1.069 |
| LC | G30R | 0.540 | 1.105 | 0.713 | 0.886 |
| LC | T31A | 0.581 | 1.710 | 0.793 | 1.213 |
| LC | T31F | 1.376 | 5.199 | 1.344 | 1.642 |
| LC | T31G | 0.617 | 1.869 | 0.816 | 1.460 |
| LC | T31M | 0.639 | 2.107 | 0.898 | 1.517 |
| LC | T31S | 0.646 | 1.633 | 0.870 | 1.393 |
| LC | T31V | 0.567 | 1.498 | 0.812 | 1.275 |
| LC | T31W | 0.831 | 1.665 | 0.843 | 1.153 |
| LC | T31L | 0.889 | 1.945 | 1.066 | 1.613 |
| LC | T31K | 0.370 | 1.312 | 0.554 | 1.100 |
| LC | T31H | 0.423 | 1.446 | 0.659 | 1.196 |
| LC | N32G | 0.315 | 1.257 | 0.501 | 1.072 |
| LC | I33F | 2.925 | 4.843 | 3.859 | 4.235 |
| LC | I33G | 2.950 | 21.553 | 2.553 | 4.840 |
| LC | I33M | 1.602 | 3.012 | 2.012 | 2.650 |
| LC | I33T | 1.451 | 2.643 | 1.855 | 2.419 |
| LC | I33V | 1.020 | 2.650 | 1.502 | 2.204 |
| LC | I33H | 2.665 | 4.156 | 2.098 | 3.474 |
| LC | I48M | 0.296 | 0.926 | 0.450 | 0.755 |
| LC | I48S | 0.380 | 1.161 | 0.617 | 0.925 |
| LC | I48L | 0.401 | 1.104 | 0.537 | 0.843 |
| LC | I48K | 0.406 | 1.063 | 0.564 | 0.843 |
| LC | K49A | 0.482 | 1.910 | 0.502 | 1.306 |
| LC | K49E | 1.256 | 3.021 | 1.146 | 2.287 |
| LC | K49F | 1.447 | 4.245 | 1.325 | 2.299 |
| LC | K49G | 0.658 | 2.569 | 0.679 | 1.657 |
| LC | K49N | 0.578 | 2.026 | 0.570 | 1.043 |
| LC | K49Q | 0.536 | 2.041 | 0.524 | 1.540 |
| LC | K49S | 0.362 | 1.597 | 0.376 | 1.112 |
| LC | K49T | 0.592 | 2.367 | 0.594 | 1.297 |
| LC | K49V | 1.002 | 2.973 | 0.903 | 1.586 |
| LC | K49Y | 1.231 | 3.109 | 0.970 | 1.505 |
| LC | K49L | 0.903 | 3.860 | 0.881 | 2.054 |
| LC | K49H | 0.912 | 2.578 | 0.843 | 1.128 |
| LC | K49R | 0.342 | 1.611 | 0.345 | 1.300 |
| LC | A51T | 0.980 | 2.366 | 1.388 | 1.877 |
| LC | A51L | 0.763 | 2.758 | 1.330 | 2.485 |
| LC | S52A | 0.398 | 1.531 | 0.770 | 0.850 |
| LC | S52C | 1.091 | 1.720 | 1.195 | 1.383 |
| LC | S52D | 0.499 | 1.721 | 0.920 | 1.535 |
| LC | S52E | 0.535 | 1.648 | 1.011 | 1.400 |
| LC | S52G | 0.519 | 0.996 | 0.672 | 0.840 |
| LC | S52I | 0.893 | 1.799 | 1.225 | 1.511 |
| LC | S52M | 1.055 | 1.884 | 1.390 | 1.453 |
| LC | S52Q | 0.770 | 1.500 | 1.142 | 1.279 |
| LC | S52V | 0.559 | 1.542 | 0.982 | 1.388 |
| LC | S52W | 0.877 | 1.678 | 1.176 | 1.399 |
| LC | S52R | 0.447 | 1.379 | 0.713 | 1.159 |
| LC | S52K | 0.689 | 1.700 | 0.974 | 1.264 |
| LC | E53G | 0.124 | 0.591 | 0.143 | 0.447 |
| LC | S54M | 0.196 | 1.032 | 0.394 | 0.943 |
| LC | I55A | 0.256 | 0.952 | 0.444 | 0.603 |
| LC | I55F | 0.445 | 1.383 | 0.762 | 1.190 |
| LC | S56G | 0.760 | 3.081 | 0.742 | 1.858 |
| LC | S56L | 0.934 | 3.319 | 0.889 | 1.682 |
| LC | S56A | 0.545 | 2.069 | 0.555 | 1.215 |
| LC | S56C | 1.565 | 3.809 | 1.294 | 0.889 |
| LC | S56D | 0.622 | 2.026 | 0.596 | 1.222 |
| LC | S56E | 0.523 | 2.033 | 0.513 | 1.279 |
| LC | S56F | 0.591 | 1.918 | 0.584 | 1.086 |
| LC | S56N | 0.555 | 1.949 | 0.573 | 1.119 |
| LC | S56P | 0.397 | 1.746 | 0.410 | 1.441 |
| LC | S56Q | 0.511 | 1.827 | 0.504 | 1.015 |
| LC | S56V | 0.563 | 2.070 | 0.564 | 1.279 |
| LC | S56W | 0.731 | 2.335 | 0.674 | 1.212 |
| LC | S56H | 0.414 | 1.379 | 0.325 | 1.528 |
| LC | S56R | 0.786 | 2.454 | 0.716 | 1.271 |
| LC | S56K | 0.476 | 1.808 | 0.470 | 1.146 |
| LC | Y86F | 2.224 | 3.759 | 1.675 | 3.937 |
| LC | Y86M | 2.183 | 3.912 | 1.679 | 4.267 |
| LC | Y86H | 1.595 | 2.459 | 1.224 | 1.087 |
| LC | Y87L | 1.922 | 2.752 | 0.963 | 1.374 |
| LC | Y87C | 1.722 | 2.953 | 1.047 | 1.408 |
| LC | Y87D | 3.099 | 4.313 | 1.364 | 2.624 |
| LC | Y87F | 0.376 | 1.332 | 0.398 | 0.817 |
| LC | Y87G | 3.312 | 4.426 | 1.249 | 2.134 |
| LC | Y87I | 0.609 | 1.941 | 0.593 | 1.044 |
| LC | Y87N | 2.778 | 9.344 | 1.195 | 1.738 |
| LC | Y87P | 2.621 | 3.657 | 1.389 | 2.794 |
| LC | Y87S | 1.480 | 2.785 | 0.972 | 1.264 |
| LC | Y87T | 1.323 | 2.744 | 1.064 | 1.629 |
| LC | Y87V | 0.736 | 2.206 | 0.684 | 1.058 |
| LC | Y87W | 0.793 | 2.161 | 0.782 | 1.338 |
| LC | Y87K | 2.610 | 3.360 | 1.262 | 1.867 |
| LC | Y87H | 0.236 | 0.470 | 0.160 | 0.429 |
| LC | Y87R | 1.388 | 2.280 | 0.834 | 1.237 |
| LC | Q89E | 0.961 | 1.749 | 1.031 | 1.387 |
| LC | N91L | 1.701 | 3.145 | 0.851 | 2.286 |
| LC | N91A | 0.275 | 1.079 | 0.251 | 0.948 |
| LC | N91C | 0.640 | 1.490 | 0.543 | 0.990 |
| LC | N91I | 0.678 | 2.153 | 0.632 | 0.685 |
| LC | N91M | 0.655 | 1.996 | 0.607 | 1.575 |
| LC | N91S | 0.363 | 1.688 | 0.345 | 1.494 |
| LC | N91T | 0.450 | 1.583 | 0.418 | 1.138 |
| LC | N91V | 0.401 | 1.446 | 0.377 | 1.272 |
| LC | N91H | 0.568 | 1.649 | 0.541 | 0.880 |
| LC | N91R | 0.029 | 0.121 | 0.026 | 0.118 |
| LC | N92C | 1.107 | 2.897 | 1.022 | 2.216 |
| LC | N92D | 0.819 | 2.986 | 0.792 | 2.241 |
| LC | N92L | 0.688 | 1.848 | 0.730 | 0.962 |
| LC | N92M | 0.576 | 1.892 | 0.593 | 0.912 |
| LC | N92S | 0.639 | 2.367 | 0.566 | 1.408 |
| LC | N92T | 0.735 | 2.923 | 0.759 | 1.960 |
| LC | N92V | 0.924 | 4.052 | 0.933 | 2.824 |
| LC | N92W | 0.563 | 2.322 | 0.532 | 2.091 |
| LC | N92Y | 1.771 | 2.649 | 1.465 | 2.052 |
| LC | N92H | 0.620 | 2.443 | 0.579 | 2.005 |
| LC | N92K | 0.635 | 0.817 | 0.687 | 0.700 |
| LC | N92R | 0.711 | 1.893 | 0.705 | 0.821 |
| LC | N93T | 0.035 | 0.085 | 0.050 | 0.062 |
| LC | T96L | 0.577 | 1.631 | 0.727 | 0.917 |
| LC | T96C | 1.341 | 3.139 | 1.570 | 2.292 |
| LC | T96M | 0.726 | 2.470 | 0.963 | 1.503 |
| LC | T96V | 0.476 | 1.360 | 0.663 | 1.032 |
| LC | T97L | 0.758 | 1.256 | 0.934 | 1.050 |
| LC | T97A | 0.430 | 0.978 | 0.852 | 0.427 |
| LC | T97D | 1.045 | 1.378 | 1.007 | 1.186 |
| LC | T97G | 0.722 | 1.113 | 1.018 | 0.988 |
| LC | T97Q | 0.616 | 1.181 | 1.025 | 1.058 |
| LC | T97S | 0.636 | 0.821 | 0.952 | 0.657 |
| LC | T97V | 0.629 | 1.355 | 0.919 | 1.176 |
| LC | T97K | 0.388 | 0.782 | 0.747 | 0.721 |
| LC | T97R | 0.859 | 1.424 | 0.748 | 1.681 |
| LC | F98A | 1.103 | 1.634 | 1.008 | 0.762 |
| LC | F98M | 1.483 | 2.284 | 1.354 | 2.064 |
| LC | F98S | 1.355 | 2.066 | 1.373 | 1.903 |
| LC | F98V | 2.045 | 2.874 | 1.802 | 2.446 |
| LC | F98Y | 0.548 | 1.302 | 0.669 | 1.077 |
| LC | G99L | 1.340 | 1.901 | 0.964 | 1.484 |
| LC | G99D | 1.750 | 2.208 | 1.387 | 1.970 |
| LC | G99E | 2.145 | 3.593 | 1.738 | 3.642 |
| LC | G99F | 4.569 | 7.151 | 2.674 | 4.939 |
| LC | G99I | 3.247 | 4.768 | 2.653 | 4.512 |
| LC | G99M | 3.359 | 5.103 | 2.188 | 4.173 |
| LC | G99N | 2.872 | 3.607 | 2.348 | 3.907 |
| LC | G99S | 0.960 | 1.660 | 1.158 | 0.999 |
| LC | G99T | 1.757 | 2.243 | 1.591 | 1.690 |
| LC | G99V | 2.850 | 3.773 | 2.351 | 2.864 |
| LC | G99K | 8.663 | 14.378 | 6.534 | 6.695 |
| LC | G99H | 1.416 | 1.792 | 1.323 | 1.311 |
| LC | Q100C | 1.256 | 2.897 | 1.023 | 1.414 |
| LC | Q100D | 0.772 | 2.716 | 0.802 | 1.875 |
| LC | Q100E | 0.797 | 2.698 | 0.808 | 1.570 |
| LC | Q100F | 0.716 | 2.360 | 0.696 | 1.404 |
| LC | Q100I | 1.154 | 3.244 | 1.113 | 1.986 |
| LC | Q100M | 0.867 | 2.533 | 0.800 | 1.460 |
| LC | Q100N | 0.472 | 2.107 | 0.491 | 1.691 |
| LC | Q100P | 0.736 | 2.823 | 0.778 | 1.850 |
| LC | Q100T | 0.870 | 3.235 | 0.864 | 0.896 |
| LC | Q100V | 0.672 | 2.331 | 0.659 | 1.447 |
| LC | Q100W | 0.791 | 2.343 | 0.783 | 1.211 |
| LC | Q100Y | 0.736 | 2.780 | 0.760 | 2.001 |
| LC | Q100K | 0.726 | 2.396 | 0.694 | 1.351 |
| LC | Q100H | 0.630 | 2.086 | 0.618 | 1.323 |
| LC | Q100R | 0.761 | 2.471 | 0.759 | 1.380 |

^{a}HC = Heavy Chain, LC = Light Chain

[0908] 2. Confirmation Screen

[0909] A confirmation screen was performed as described in part 1, except that 5% serum was used at both pH values. Table 17 sets forth the OD at pH 6.0 (OD_{6.0}) at each dilution, OD at pH 7.4 (OD_{7.4}) at each dilution, and the ratio of the average OD values at pH 6.0 and 7.4 (OD_{6.0}/OD_{7.4}) for the exemplary tested modified antibodies at Dilution 1 and Dilution 2.

TABLE 17
Variant anti-EGFR antibodies

| | | | | | | | | | | (OD pH 6.0)/ | |
|---|---|---|---|---|---|---|---|---|---|---|---|
| | | OD pH 6.0 | | | | OD pH 7.4.0 | | | | (OD pH 7.4) | |
| Chain^{a} | Mutation | Dilution 1 | | Dilution 2 | | Dilution 1 | | Dilution 2 | | Dilution 1 | Dilution 2 |
| HC | L029Y | 0.181 | 0.179 | 0.092 | 0.093 | 0.132 | 0.130 | 0.075 | 0.079 | 1.370 | 1.206 |
| HC | L029S | 1.116 | 1.143 | 0.303 | 0.327 | 0.545 | 0.583 | 0.074 | 0.074 | 2.004 | 4.251 |
| HC | L029K | 1.940 | 1.906 | 0.529 | 0.724 | 1.122 | 1.134 | 0.324 | 0.000 | 1.705 | 1.970 |
| HC | L029H | 0.814 | 0.790 | 0.216 | 0.203 | 0.396 | 0.355 | 0.132 | 0.124 | 2.142 | 1.635 |
| HC | L029N | 0.248 | 0.259 | 0.111 | 0.099 | 0.156 | 0.157 | 0.083 | 0.092 | 1.623 | 1.215 |
| HC | L029D | 0.543 | 0.496 | 0.156 | 0.149 | 0.285 | 0.290 | 0.104 | 0.115 | 1.808 | 1.401 |
| HC | L029V | 0.807 | 0.851 | 0.204 | 0.237 | 0.397 | 0.409 | 0.135 | 0.130 | 2.058 | 1.669 |
| HC | L029F | 0.420 | 0.445 | 0.131 | 0.137 | 0.251 | 0.244 | 0.105 | 0.108 | 1.748 | 1.255 |
| HC | L029I | 1.753 | 1.713 | 0.514 | 0.522 | 0.948 | 0.918 | 0.273 | 0.278 | 1.858 | 1.880 |
| HC | L029A | 1.822 | 1.861 | 0.582 | 0.662 | 0.938 | 0.888 | 0.275 | 0.289 | 2.019 | 2.202 |
| HC | L029M | 1.472 | 1.358 | 0.435 | 0.465 | 0.751 | 0.729 | 0.206 | 0.215 | 1.912 | 2.135 |
| HC | L029G | 0.291 | 0.289 | 0.111 | 0.111 | 0.171 | 0.165 | 0.089 | 0.093 | 1.723 | 1.226 |
| HC | T030V | 2.448 | 2.492 | 1.150 | 1.727 | 2.045 | 2.162 | 0.673 | 0.812 | 1.175 | 1.917 |
| HC | T030G | 2.528 | 2.483 | 1.323 | 1.329 | 1.748 | 1.659 | 0.557 | 0.000 | 1.471 | 2.399 |
| HC | T030S | 2.411 | 2.423 | 1.046 | 1.209 | 1.520 | 1.545 | 0.467 | 0.418 | 1.578 | 2.567 |
| HC | T030M | 2.189 | 2.256 | 0.713 | 0.900 | 1.289 | 1.230 | 0.338 | 0.322 | 1.766 | 2.453 |
| HC | T030R | 2.326 | 2.269 | 0.683 | 0.995 | 1.260 | 1.376 | 0.340 | 0.370 | 1.748 | 2.349 |
| HC | T030P | 2.217 | 2.216 | 0.688 | 0.911 | 1.261 | 1.159 | 0.318 | 0.375 | 1.836 | 2.298 |
| HC | T030H | 2.062 | 2.003 | 0.658 | 0.749 | 1.225 | 1.163 | 0.276 | 0.354 | 1.703 | 2.249 |
| HC | T030W | 2.042 | 2.058 | 0.683 | 0.702 | 1.208 | 1.139 | 0.316 | 0.322 | 1.748 | 2.170 |
| HC | T030D | 2.378 | 2.404 | 1.055 | 1.352 | 1.462 | 1.549 | 0.461 | 0.478 | 1.589 | 2.559 |
| HC | T030N | 2.276 | 2.237 | 0.907 | 1.027 | 1.396 | 1.326 | 0.373 | 0.410 | 1.659 | 2.470 |
| HC | Y032L | 1.263 | 1.249 | 0.307 | 0.349 | 0.570 | 0.567 | 0.182 | 0.161 | 2.209 | 1.932 |
| HC | Y032R | 1.871 | 1.881 | 0.513 | 0.554 | 0.994 | 0.980 | 0.279 | 0.259 | 1.901 | 1.987 |
| HC | Y032N | 2.023 | 2.042 | 0.611 | 2.097 | 0.992 | 1.090 | 0.365 | 0.359 | 1.957 | 1.832 |
| HC | Y032H | 2.097 | 2.099 | 0.804 | 0.841 | 1.199 | 1.229 | 0.397 | 0.396 | 1.729 | 2.074 |
| HC | Y032C | 0.426 | 0.451 | 0.137 | 0.168 | 0.378 | 0.401 | 0.140 | 0.137 | 1.125 | 1.104 |
| HC | Y032T | 1.927 | 1.880 | 0.732 | 0.963 | 1.333 | 1.316 | 0.582 | 0.643 | 1.437 | 1.378 |
| HC | Y032M | 2.356 | 2.411 | 0.557 | 0.825 | 1.622 | 1.604 | 0.462 | 0.504 | 1.478 | 1.423 |
| HC | V034L | 0.554 | 0.537 | 0.157 | 0.171 | 0.270 | 0.251 | 0.103 | 0.103 | 2.095 | 1.592 |
| HC | V034I | 1.200 | 1.061 | 0.317 | 1.455 | 0.533 | 0.503 | 0.147 | 0.163 | 2.183 | 2.076 |
| HC | V034M | 1.455 | 1.549 | 0.433 | 0.466 | 0.723 | 0.762 | 0.222 | 0.230 | 2.023 | 1.986 |
| HC | V034C | 1.317 | 1.265 | 0.359 | 0.357 | 0.667 | 0.652 | 0.197 | 0.192 | 1.956 | 1.845 |
| HC | H035N | 0.888 | 0.839 | 0.319 | 0.436 | 0.718 | 0.748 | 0.241 | 0.254 | 1.179 | 1.518 |
| HC | W036L | 1.601 | 1.562 | 0.456 | 0.495 | 0.629 | 0.599 | 0.201 | 0.207 | 2.578 | 2.332 |
| HC | W036Y | 0.608 | 0.574 | 0.171 | 0.176 | 0.242 | 0.224 | 0.101 | 0.108 | 2.533 | 1.662 |
| HC | I069T | 0.496 | 0.486 | 0.154 | 0.150 | 0.216 | 0.217 | 0.096 | 0.099 | 2.272 | 1.557 |
| HC | I069M | 0.498 | 0.509 | 0.148 | 0.181 | 0.216 | 0.239 | 0.096 | 0.100 | 2.218 | 1.673 |
| HC | I069C | 0.512 | 0.505 | 0.159 | 0.164 | 0.253 | 0.243 | 0.106 | 0.112 | 2.049 | 1.482 |
| HC | Y093H | 0.551 | 0.523 | 0.187 | 0.170 | 0.328 | 0.358 | 0.115 | 0.123 | 1.571 | 1.504 |
| HC | Y094L | 1.173 | 1.151 | 0.334 | 0.279 | 0.497 | 0.532 | 0.109 | 0.187 | 2.262 | 2.276 |
| HC | Y094R | 2.325 | 2.409 | 0.662 | 1.199 | 1.494 | 1.455 | 0.446 | 0.454 | 1.606 | 2.063 |
| HC | R097H | 1.077 | 1.150 | 0.211 | 0.360 | 0.406 | 0.425 | 0.139 | 0.143 | 2.679 | 2.019 |
| HC | L099N | 2.052 | 2.205 | 0.704 | 0.695 | 1.227 | 1.220 | 0.265 | 0.524 | 1.739 | 2.209 |
| HC | Y104S | 0.695 | 0.801 | 0.211 | 0.280 | 0.117 | 0.111 | 0.075 | 0.084 | 6.562 | 3.059 |
| HC | Y104V | 2.078 | 2.153 | 0.687 | 0.947 | 1.288 | 1.358 | 0.421 | 0.512 | 1.599 | 1.741 |
| HC | Y104D | 1.486 | 1.505 | 0.580 | 0.724 | 0.439 | 0.413 | 0.111 | 0.196 | 3.515 | 4.457 |
| HC | Y104M | 1.847 | 1.883 | 0.670 | 1.043 | 0.899 | 0.852 | 0.316 | 0.428 | 2.132 | 2.279 |
| HC | Y104F | 1.527 | 1.463 | 0.410 | 0.527 | 0.638 | 0.574 | 0.183 | 0.241 | 2.471 | 2.217 |
| HC | Y104L | 1.343 | 1.585 | 0.418 | 0.557 | 0.681 | 0.646 | 0.204 | 0.247 | 2.213 | 2.152 |
| HC | A107E | 1.556 | 1.487 | 0.505 | 0.500 | 0.665 | 0.648 | 0.203 | 0.232 | 2.318 | 2.324 |
| HC | Y108I | 1.148 | 1.257 | 0.282 | 0.411 | 0.533 | 0.492 | 0.173 | 0.179 | 2.353 | 1.964 |
| HC | Y108L | 0.880 | 0.950 | 0.287 | 0.244 | 0.481 | 0.473 | 0.133 | 0.195 | 1.918 | 1.704 |
| HC | Y108W | 1.331 | 1.377 | 0.414 | 0.426 | 0.673 | 0.667 | 0.188 | 0.286 | 2.022 | 1.844 |
| HC | Y108T | 1.494 | 1.566 | 0.292 | 0.528 | 0.608 | 0.709 | 0.192 | 0.220 | 2.333 | 1.961 |
| HC | Y108S | 1.293 | 1.358 | 0.311 | 0.404 | 0.595 | 0.565 | 0.169 | 0.174 | 2.288 | 2.079 |
| HC | Y108N | 1.409 | 1.374 | 0.360 | 0.435 | 0.623 | 0.640 | 0.182 | 0.193 | 2.205 | 2.114 |
| HC | Y108K | 0.183 | 0.541 | 0.149 | 0.164 | 0.266 | 0.261 | 0.109 | 0.105 | 1.380 | 1.471 |
| HC | W109M | 0.583 | 0.678 | 0.175 | 0.205 | 0.303 | 0.314 | 0.108 | 0.128 | 2.042 | 1.616 |
| HC | W109I | 0.440 | 0.466 | 0.143 | 0.151 | 0.241 | 0.234 | 0.099 | 0.108 | 1.907 | 1.420 |
| HC | G110A | 1.906 | 2.205 | 0.608 | 0.910 | 1.130 | 1.104 | 0.360 | 0.334 | 1.843 | 2.205 |
| HC | G110D | 1.639 | 1.450 | 0.431 | 0.445 | 0.731 | 0.713 | 0.218 | 0.191 | 2.138 | 2.156 |
| HC | G110T | 0.770 | 0.783 | 0.203 | 0.176 | 0.381 | 0.399 | 0.145 | 0.112 | 1.992 | 1.482 |
| HC | G112A | 1.162 | 1.194 | 0.303 | 0.392 | 0.623 | 0.644 | 0.180 | 0.147 | 1.860 | 2.173 |
| LC | I033M | 2.183 | 2.207 | 0.721 | 0.639 | 1.336 | 1.183 | 0.372 | 0.348 | 1.750 | 1.889 |
| LC | I033L | 2.051 | 2.115 | 0.639 | 0.797 | 1.071 | 1.047 | 0.287 | 0.315 | 1.968 | 2.379 |
| LC | I033T | 0.928 | 0.912 | 0.244 | 0.237 | 0.389 | 0.388 | 0.134 | 0.128 | 2.367 | 1.838 |
| LC | I033F | 0.780 | 0.765 | 0.193 | 0.215 | 0.346 | 0.346 | 0.124 | 0.124 | 2.235 | 1.646 |
| LC | I033A | 0.922 | 1.005 | 0.274 | 0.265 | 0.462 | 0.486 | 0.149 | 0.153 | 2.031 | 1.785 |
| LC | I033C | 1.370 | 1.356 | 0.399 | 0.417 | 0.642 | 0.708 | 0.196 | 0.233 | 2.025 | 1.912 |
| LC | I033V | 2.386 | 2.389 | 1.302 | 1.776 | 1.895 | 1.804 | 0.703 | 0.766 | 1.292 | 2.085 |
| LC | Y086H | 0.503 | 0.561 | 0.140 | 0.165 | 0.232 | 0.275 | 0.103 | 0.103 | 2.107 | 1.481 |
| LC | Y086F | 0.496 | 0.517 | 0.157 | 0.158 | 0.241 | 0.253 | 0.099 | 0.097 | 2.051 | 1.602 |
| LC | F098S | 0.704 | 0.726 | 0.165 | 0.225 | 0.288 | 0.303 | 0.111 | 0.148 | 2.422 | 1.503 |
| LC | F098Y | 2.236 | 2.283 | 0.899 | 1.225 | 1.360 | 1.352 | 0.399 | 0.000 | 1.667 | 2.291 |
| LC | F098M | 0.408 | 0.452 | 0.136 | 0.144 | 0.190 | 0.185 | 0.096 | 0.096 | 2.296 | 1.457 |
| LC | G099D | 0.734 | 0.717 | 0.200 | 0.214 | 0.330 | 0.285 | 0.111 | 0.123 | 2.373 | 1.774 |
| LC | G099S | 1.948 | 1.945 | 0.684 | 0.732 | 1.140 | 1.225 | 0.314 | 0.321 | 1.648 | 2.230 |
| LC | G099L | 0.546 | 0.501 | 0.160 | 0.188 | 0.262 | 0.256 | 0.110 | 0.101 | 2.020 | 1.660 |
| LC | G099T | 0.845 | 0.809 | 0.233 | 0.227 | 0.432 | 0.415 | 0.137 | 0.127 | 1.951 | 1.742 |
| LC | G099H | 0.448 | 0.445 | 0.139 | 0.152 | 0.253 | 0.251 | 0.098 | 0.092 | 1.771 | 1.528 |

^{a}HC = Heavy Chain, LC = Light Chain

### Example 2

### Generation and Screening of a Combinatorial Library

[0910] A combinatorial library of anti-EGFR variant members was generated that contained antibody members having all combinations of mutations LC-I29S, V24E, S25C, F27R, R97H, Y104D and/or HC-Q111P in the Heavy Chain. The multiple point mutants were generated in the Cetuximab anti-EGFR reference antibody described in Example 1 by site-directed mutagenesis. The library contained variants of Cetuximab anti-EGFR antibody, whereby each member contained 1, 2, 3, 4, 5, 6 or 7 amino acid mutations compared to the reference antibody in the variable regions of the heavy chain (SEQ ID NO:8 with the variable heavy chain set forth in SEQ ID NO:3) or light chain (SEQ ID NO:9 with the variable light chain set forth in SEQ ID NO:10). The total number of variant members of the combinatorial library that were generated was 128. Each member of the library was sequenced. Glycerol stocks of members of the library were prepared and stored at −80° C. For screening, an expression vector encoding a member of the library was separately expressed in CHO cells as IgG antibodies and supernatants collected.

[0911] The library was screened as described in Example 1, with 25% human serum added and the antibodies diluted to concentrations 4 ng/mL, 2 ng/mL and 1 ng/mL. Exemplary antibodies exhibiting higher binding activity at pH 6.0 compared to pH 7.4 are set forth in Table 18, which sets forth the OD at pH 6.0 (OD_{6.0}), the OD at pH 7.4 (OD_{7.4}), and the ratio of the average OD values at pH 6.0 and 7.4 (OD_{6.0}/OD_{7.4}) for the modified antibodies and Cetuximab at a concentration of 4 ng/mL. Among the antibodies with the highest OD pH6.0/OD pH7.4 binding ratio were those containing a heavy chain HC-Y104D/Q111P (SEQ ID NO:1062), HC-V24E/F27R/R97H/Q111P (SEQ ID NO:1093), HC-S25C/Y104D (SEQ ID NO:1112), and HC-S25C/Q111P (SEQ ID NO:1113).

TABLE 18
Modified anti-EGFR antibodies

| | | | | | (OD pH |
|---|---|---|---|---|---|
| | | | | | 6.0)/(OD |
| | OD (pH 6.0) | | OD (pH 7.4) | | pH 7.4) |
| Mutation(s) | 4 ng/mL | | 4 ng/mL | | 4 ng/mL |
| HC-V24E | 0.379 | 0.325 | 0.216 | 0.260 | 1.476 |
| HC-V24E | 2.028 | 2.100 | 1.796 | 1.621 | 1.208 |
| HC-S25C | 2.179 | 2.044 | 1.785 | 1.765 | 1.190 |
| HC-S25C | 2.021 | 2.229 | 1.822 | 1.832 | 1.163 |
| HC-F27R | 1.988 | 1.714 | 1.727 | 1.628 | 1.103 |
| HC-F27R | 1.821 | 1.808 | 1.650 | 1.549 | 1.135 |
| HC-R97H | 2.167 | 2.077 | 1.649 | 1.585 | 1.312 |
| HC-R97H | 2.021 | 1.988 | 1.345 | 1.289 | 1.523 |
| HC-Y104D | 1.655 | 1.702 | 0.609 | 0.596 | 2.786 |
| HC-Y104D | 1.421 | 1.402 | 0.476 | 0.470 | 2.986 |
| HC-S25C/HC-Y104D | 1.026 | 1.045 | 0.131 | 0.132 | 7.905 |
| HC-S25C/HC-Y104D | 1.025 | 0.882 | 0.200 | 0.145 | 5.528 |
| HC-Y104D | 1.245 | 1.254 | 0.311 | 0.322 | 3.948 |
| HC-Q111P | 2.177 | 2.101 | 1.887 | 1.732 | 1.182 |
| HC-Q111P | 2.030 | 2.032 | 1.607 | 1.587 | 1.272 |
| HC-S25C/HC-Q111P | 1.967 | 1.890 | 1.553 | 1.557 | 1.240 |
| LC-I29S | 1.888 | 1.918 | 1.500 | 1.575 | 1.238 |
| HC-Y104D/HC-Q111P | 1.140 | 1.081 | 0.166 | 0.167 | 6.670 |
| HC-S25C/LC-I29S | 1.840 | 1.793 | 1.694 | 1.616 | 1.098 |
| HC-Y104D/LC-I29S | 1.181 | 1.188 | 0.750 | 0.636 | 1.709 |
| HC-Q111P/LC-I29S | 1.785 | 1.763 | 1.287 | 1.361 | 1.340 |
| HC-Y104D/HC- | 1.048 | 0.990 | 0.700 | 0.768 | 1.388 |
| Q111P/LC-I29S | | | | | |
| HC-V24E/HC-F27R/ | 0.374 | 0.393 | 0.201 | 0.239 | 1.743 |
| HC-R97H/HC-Q111P | | | | | |
| HC-V24E/HC-F27R/HC- | 0.460 | 0.440 | 0.246 | 0.227 | 1.903 |
| R97H/HC-Q111P | | | | | |
| Reference Cetuximab | 1.784 | 1.700 | 1.326 | 1.266 | 1.344 |

### Example 3

### Effect of Addition of Human Serum on ELISA

[0912] The effect of human serum on binding of the unmodified (Cetuximab reference antibody) and variant anti-EGFR antibodies (HC-Y104D and HC-Y104D/HC-Q111P) was determined by a quantitative ELISA.

### 1. Expression and Purification

[0913] CHO-S cells were cultured in shaker flasks using CD-CHO media supplemented with GlutaMAX (8 mM). On the day of transfection, 300 mL of CHO—S cells at an approximate density of 1.0×10⁶ cells/mL were transfected using 375 μg of plasmid DNA with 375 μL of FreeStyle™ MAX Reagent (Invitrogen) following the manufacturer's protocol. The media were harvested by centrifugation (4000 g×20′) at 96 hours after transfection. The expressed antibodies in the conditioned media were further purified by affinity chromatography using a protein A column (2 mL) prepared from Protein A resin (BioRad: Cat#156-0218). IgG bound to the column was eluted in one step with 0.1 M glycine-HCl, pH 2.5. The eluted IgG was neutralized and dialyzed prior to protein determination using a BCA protein assay (Pierce Biotechnology).

[0914] To establish stable cell lines expressing the HC-Y104D mutant, 30 mL of CHO-S cells at an approximate density of 1.0×10⁶ cells/mL were transfected using 37.5 μg of plasmid DNA with 37.5 μL of FreeStyle™ MAX Reagent (Invitrogen) following the manufacturer's protocol. 72-hour post transfection, the cells were cloned in CD-CHO media supplemented with GlutaMAX (8 mM) and 1 mg/mL G418 using the 1-dimensional serial dilution strategy in 15 wells of 96-well round bottom plates (Nunc). Four weeks later, clones expressing Y104D mutant were screened by western blot analysis (WB) using peroxidase conjugated anti-human IgG Fc (Jackson Immonolab) as detecting antibodies. Positive clones were expanded step-wise into 12-well then 6-well plates, followed by T-25 and T-75 flasks and eventually to shaker flasks. Two clones, 13E3 and 15D6 expressing at 5 mg/L of Y104D, were further expanded to wavebag bioreactor production to support all the in vitro, ex vivo and in vivo characterization of Y104D mutants.

[0915] To establish stable cell lines expressing the HC-Y104D/Q111P double mutant, 25×5 mL of CHO-S cells at an approximate density of 1.0×10⁶ cells/mL were transfected using 25 μg of plasmid DNA by electroporation using the MaxCyte STX apparatus following the manufacturer's protocol. 72-hour post transfection, 4×5 mL of the cells were cloned in CD-CHO media supplemented with GlutaMAX (8 mM) and 1 mg/mL G418 using the 1-dimensional serial dilution strategy in 25 wells of 96-well round bottom plates (Nunc). Four weeks later, clones expressing the Y104D/Q111P mutant were screened by western blot analysis (WB) using peroxidase conjugated anti-human IgG Fc (Jackson Immonolab) as the detecting antibody. Positive clones were then expanded step-wise to shaker flasks as described above. Two clones, 9-1-5B and 9-4-6A, expressing at 2-5 mg/L of Y104D/Q111P, were further expanded to wavebag bioreactor production to support all the in vitro, ex vivo and in vivo characterization of Y104D/Q111P mutants.

### 2. Effect of Addition of Human Serum on ELISA

[0916] The ELISA assay was performed as described in Example 1 with some modifications. Three (3)-fold serial dilutions of the Cetuximab anti-EGFR-FLAG reference antibody and FLAG-tagged anti-EGFR HC-Y104D and HC-Y104D/Q111P mutant antibodies were prepared from a starting concentration of 100 ng/mL. The standard and mutant antibodies were prepared in pH 7.4 Buffer (KRB, pH 7.4, 1 mM lactic acid) containing either no serum, 5% human serum or 25% human serum. The standard and mutant antibodies also were prepared in pH 6.0 Buffer (KRB, 16.6 mM lactic acid) containing either no serum, 5% human serum or 25% human serum. For each condition, the final concentrations of anti-EGFR-FLAG antibody standard and HC-Y104D and HC-Y104D/Q111P mutant antibodies were 666.67 pM (100 ng/mL), 222.22 pM (33.33 ng/mL), 74.07 pM (11.11 ng/mL), 24.69 pM (3.70 ng/mL), 8.23 pM (1.23 ng/mL), 2.74 pM (0.41 ng/mL), 0.91 pM (0.137 ng/mL) and 0. One hundred microliters (100 μL) of each concentration of each antibody were added to wells of a 96-well plate. Each plate included an anti-EGFR-FLAG antibody standard, a positive control (parental antibody) and a negative control (no primary antibody). The ELISA was performed in triplicate.

[0917] The results showed that human serum increased binding of the variant anti-EGFR to sECD EGFR. Compared to binding to sECD EGFR in the presence of no human serum, the addition of 5% human serum resulted in approximately a 3-fold increase in OD for the HC-Y104D and HC-Y104D/HC-Q 111P anti-EGFR variants at pH 6.0 or pH 7.4. The addition of 25% human serum resulted in approximately a 4- to 5-fold increase in OD for the HC-Y104D and HC-Y104D/HC-Q111P anti-EGFR variants at pH 6.0 or pH 7.4, compared to binding in the presence of no human serum. For Cetuximab, addition of 5% or 25% human serum at pH 6.0 or pH 7.4 resulted in less than a 2-fold increase in OD compared to the OD in the presence of no human serum.

### Example 4

### Effect of Lactic Acid Concentration on ELISA

[0918] The effect of lactic acid on binding of the unmodified (Cetuximab reference antibody) and variant anti-EGFR antibodies (HC-Y104D and HC-Y104D/HC-Q111P) was determined by pH-sensitive ELISA, as described in Example 3, with modification to the assay buffer.

[0919] The Cetuximab anti-EGFR-FLAG reference antibody standards, and FLAG-tagged anti-EGFR antibody variants (HC-Y104D or HC-Y104D/HC-Q111P) to be tested, were prepared in pH 6.0 Buffer (KRB, pH 6.0, without serum) containing either 16.7 mM lactic acid or no lactic acid. Standards and mutants also were prepared in pH 7.4 Buffer (KRB, without serum) containing either 16.7 mM lactic acid or no lactic acid. Each antibody was diluted to final concentrations of 666.67 pM (100 ng/mL), 222.22 pM (33.33 ng/mL), 74.07 pM (11.11 ng/mL), 24.69 pM (3.70 ng/mL), 8.23 pM (1.23 ng/mL), 2.74 pM (0.41 ng/mL), 0.91 pM (0.137 ng/mL) and 0. 100 μL of the standards and antibody variants were added to the appropriate wells. Each plate included an anti-EGFR-FLAG antibody standard, a positive control (parental antibody) and a negative control (no primary antibody). The ELISA was performed in triplicate. The results showed that the presence of increased lactic acid had no significant effect on the binding of Cetuximab or the anti-EGFR variants to sECD EGFR at pH6.0 or pH 7.4.

### Example 5

### Binding Affinity of Identified Hits

[0920] Bio-layer interferometry was performed to measure binding of variant anti-EGFR antibodies to EGFR at pH 6.5 and pH 7.4. The dissociation constant (K_{D}) of Cetuximab and variant anti-EGFR antibodies for sEGFR was measured by bio-layer interferometry in a 96-well format using an Octet QKe instrument (ForteBio, Menlo Park, Calif.). Data Acquisition software was used for all the operation steps including biotinylated sECD EGFR ligand loading and antibody association and dissociation steps. The ligand loading and antibody association and dissociation steps were performed with two groups at different pH values (pH 6.5 group and pH 7.4 group).

[0921] Biotinylated sECD EGFR was prepared by adding 15 μL of NHS-PEG4-Biotin solution (20 mM in ultrapure water) (PIERCE, Cat#21329) for 1 mg of sEGFR in solution, and incubating the reaction mixture at room temperature for 30 minutes. Nonreacted NHS-PEG4-Biotin was removed by dialysis, and the protein concentration of biotinylated sEGFR was measured by BCA protein assay (PIERCE, Cat#23225) according to manufacturer's instruction.

[0922] 1. Binding Affinity of Anti-EGFR Variants at pH 6.5 and pH 7.4

[0923] To assess the difference in binding at different pH, for the ligand loading step, biotinylated sECD EGFR was bound to a streptavidin biolayer in PBS (pH 6.5 or pH 7.4). The streptavidin sensors were dipped in wells containing PBS (pH 6.5 or pH 7.4) for 1 minute, then the sensors were dipped in wells containing biotinylated sEGFR (50 μg/mL) in PBS (pH 6.5 or pH 7.4) for 2 minutes. Sensors were rinsed in wells containing PBS (pH 6.5 or pH 7.4). During all steps, the plate was agitated at 1000 rpm.

### Antibody Association and Dissociation Steps for Affinity Measurement:

[0924] To measure association rates, the immobilized sECD-EGFR sensors were dipped into wells with antibody (Cetuximab or variant anti-EGFR antibodies) at 22 nM or 66.7 nM in PBS at pH 6.5 or 7.4 for 2 min. To measure dissociation rates, antibody bound sensors were dipped in PBS wells at pH 6.5 or 7.4 for 4 min. Association and dissociation of sEGFR and antibody (Cetuximab or variant anti-EGFR antibody) was quantitated by measuring changes in the interference pattern generated from light reflected from the optical layer and the biolayer.

[0925] Association rates, dissociation rates and K_{D} values were calculated with Software Data Analysis (v. 6.4) using global curve fitting. The K_{D} values of Cetuximab and variant anti-EGFR antibodies at pH 6.5 and pH 7.4 are set forth in Table 19.

TABLE 19
Dissociation constants (K_{D}) of Cetuximab
and modified anti-EGFR antibodies

K_{D} (nM)

| Mutation(s) | pH 6.5 | pH 7.4 |
|---|---|---|
| Cetuximab | 0.390 | 0.299 |
| HC-Y104D | 1.96 | 2.30 |
| HC-Y104D/HC-Q111P | 1.74 | 1.98 |

[0926] 2. Effect of Buffer Composition and pH on Binding Affinity of Anti-EGFR Variants

[0927] In a further experiment, the binding of variant anti-EGFR antibodies to sECD EGFR at pH 6.0, 6.5 and pH 7.4 in PBS, Krebs-Ringer Bicarbonate Buffer (KRB) or KRB with 25% human serum were measured using bio-layer interferometry similar to the methods described above. The results are set forth in Table 20 below.

TABLE 20
Dissociation constants of Cetuximab and modified anti-EGFR antibodies
at pH 6.0, pH 6.5 and pH 7.4 in PBS, KRB or KRB with 25% human serum

| Sample ID | Buffer | pH | K_{D} (M) | kₒₙ(1/Ms) | k_{off}(1/s) | Full R\hat{ }2 |
|---|---|---|---|---|---|---|
| Cetuximab | PBS | 6.0 | 1.55E−10 | 9.00E+05 | 1.39E−04 | 0.9991 |
| Y104D | PBS | 6.0 | 7.48E−10 | 7.91E+05 | 5.92E−04 | 0.9937 |
| Y104DQ111P | PBS | 6.0 | 7.97E−10 | 8.82E+05 | 7.02E−04 | 0.9906 |
| Cetuximab | KRB | 6.0 | 6.01E−11 | 9.61E+05 | 5.78E−05 | 0.9990 |
| Y104D | KRB | 6.0 | 8.82E−10 | 7.07E+05 | 6.23E−04 | 0.9912 |
| Y104DQ111P | KRB | 6.0 | 11.9E−10 | 8.03E+05 | 9.52E−04 | 0.9874 |
| Cetuximab | KRB + 25% Hu S | 6.0 | 8.22E−12 | 1.14E+06 | 9.37E−06 | 0.9864 |
| Y104D | KRB + 25% Hu S | 6.0 | 1.98E−10 | 2.00E+06 | 3.94E−04 | 0.9892 |
| Y104DQ111P | KRB + 25% Hu S | 6.0 | 2.95E−10 | 2.09E+06 | 6.17E−04 | 0.9855 |
| Cetuximab | PBS | 6.5 | 1.70E−10 | 9.84E+05 | 1.67E−04 | 0.9988 |
| Y104D | PBS | 6.5 | 8.78E−10 | 8.01E+05 | 7.04E−04 | 0.9916 |
| Y104DQ111P | PBS | 6.5 | 8.89E−10 | 9.02E+05 | 8.02E−04 | 0.9918 |
| Cetuximab | KRB | 6.5 | 1.04E−10 | 8.96E+05 | 9.35E−05 | 0.9991 |
| Y104D | KRB | 6.5 | 10.4E−10 | 9.48E+05 | 9.87E−04 | 0.9923 |
| Y104DQ111P | KRB | 6.5 | 10.5E−10 | 1.12E+06 | 1.18E−03 | 0.9748 |
| Cetuximab | KRB + 25% Hu S | 6.5 | 5.81E−11 | 1.33E+06 | 7.69E−05 | 0.9984 |
| Y104D | KRB + 25% Hu S | 6.5 | 2.52E−10 | 1.85E+06 | 4.66E−04 | 0.9931 |
| Y104DQ111P | KRB + 25% Hu S | 6.5 | 2.82E−10 | 1.94E+06 | 5.46E−04 | 0.9897 |
| Cetuximab | PBS | 7.4 | 1.13E−10 | 8.49E+05 | 9.58E−05 | 0.9992 |
| Y104D | PBS | 7.4 | 1.52E−09 | 4.08E+05 | 6.20E−04 | 0.9919 |
| Y104DQ111P | PBS | 7.4 | 1.41E−09 | 5.52E+05 | 7.76E−04 | 0.9906 |
| Cetuximab | KRB | 7.4 | 1.04E−10 | 9.62E+05 | 9.98E−05 | 0.9992 |
| Cetuximab | PBS | 6.0 | 1.55E−10 | 9.00E+05 | 1.39E−04 | 0.9991 |
| Y104D | PBS | 6.0 | 7.48E−10 | 7.91E+05 | 5.92E−04 | 0.9937 |
| Y104DQ111P | PBS | 6.0 | 7.97E−10 | 8.82E+05 | 7.02E−04 | 0.9906 |
| Cetuximab | KRB | 6.0 | 6.01E−11 | 9.61E+05 | 5.78E−05 | 0.9990 |
| Y104D | KRB | 6.0 | 8.82E−10 | 7.07E+05 | 6.23E−04 | 0.9912 |
| Y104DQ111P | KRB | 6.0 | 11.9E−10 | 8.03E+05 | 9.52E−04 | 0.9874 |
| Y104D | KRB | 7.4 | 1.66E−09 | 9.65E+05 | 1.60E−03 | 0.9746 |
| Y104DQ111P | KRB | 7.4 | 1.42E−09 | 1.37E+06 | 1.94E−03 | 0.9607 |
| Cetuximab | KRB + 25% Hu S | 7.4 | <1.0E−12 | 1.61E+06 | <1.0E−07 | 0.9908 |
| Y104D | KRB + 25% Hu S | 7.4 | 6.61E−10 | 3.44E+06 | 2.27E−03 | 0.9354 |
| Y104DQ111P | KRB + 25% Hu S | 7.4 | 10.0E−10 | 3.81E+06 | 3.81E−03 | 0.9470 |

[0928] For each buffer condition, the Y104D and Y104D/Q111P mutants exhibited lower affinities (higher K_{D} values) for sEGFR at pH 7.4 than at pH 6.0 or pH 6.5, and similar binding affinities at pH 6.0 and 6.5. The binding affinities of Cetuximab for sEGFR were similar across the pH values within each buffer type. Within pH 6.0 and pH 6.5 conditions, Cetuximab exhibited a slightly lower affinity for sEGFR in PBS compared to in KRB, and similar affinities in PBS and KRB at pH 7.4. The Y104D and Y104D/Q111P mutants exhibited similar binding in PBS and KRB, within all three pH conditions. The binding affinities of all three antibodies were highest in the presence of 25% human serum. In the presence of 25% serum; the Y104D and

[0929] Y104D/Q111P mutants and Cetuximab exhibited similar rates of association (kₒₙ), but the Y104D and Y104D/Q111P mutants exhibited higher rates of dissociation (k_{off}), resulting in a decrease in the binding affinity (K_{D}) of the mutants. The difference in the rates of dissociation (k_{off}) between Cetuximab and the mutants was greatest at pH 7.4.

### Example 6

### EGFR Phosphorylation

[0930] The concentration of phosphorylated EGFR from human neonatal keratinocytes and A431 cells treated with the reference Cetuximab antibody or anti-EGFR antibody variants was measured by ELISA (RnD systems reagents, #DYC3570-2).

[0931] 1. Preparation of Samples

[0932] Approximately 10,000 cells, human neonatal keratinocytes (Invitrogen C-001-5C) or A431 cells (ATCC CRL 1555); were plated in wells of a 96 well plate (BD Falcon #35-3072). After overnight incubation at 37° C. in a humidified atmosphere of 5% CO₂ incubator, the cells were washed, resuspended in serum free Dulbecco's Modified Eagle Medium (DMEM) and incubated overnight under the same conditions. The cells were washed with cold Phosphate Buffered Saline (PBS; 137 mM NaCl, 2.7 mM KCl, 8.1 mM Na₂HPO₄, 1.5 mM KH₂PO₄, pH 7.2-7.4). Then, the plates were divided into two groups. In the first group, 10 μg/mL purified Cetuximab or HC-Y104D anti-EGFR antibody or buffer control was added in phosphate buffer adjusted to pH 7.4. In the second group, purified Cetuximab or HC-Y104D anti-EGFR antibody or buffer control was added in phosphate buffer adjusted to pH 6.5. For A431 cells, a dose-response also was performed, whereby Cetuximab or HC-Y104D anti-EGFR antibody were added to samples at a concentration of 30 μg/mL, 10 μg/mL, 3.33 μg/mL, 1.11 μg/mL, 0.37 μg/mL, 0.123 μg/mL and 0.001 μg/mL. The cells were incubated for 15-30 minutes at 37° C.

[0933] After the initial incubation with antibody, EGF (RnD Systems, catalog no. 236-E) (100 μg/mL) was also added separately to cells in the same buffer as the antibody. Control cells were also tested where no antibody was added (EGF only) or where no antibody or EGF was added (no Rx). The cells were incubated for 15-30 minutes at 37° C. After incubation with the antigen, the cells were washed with cold PBS, and cold lysis buffer (1% NP-40 Alternative, 20 mM Tris (pH 8.0), 137 mM NaCl, 10% glycerol, 2 mM EDTA, 1 mM activated sodium orthovanadate, 10 μg/mL Aprotinin, 10 μg/mL Leupeptin) was added. The lysate was collected and was assayed immediately or stored at ≦−70° C.

[0934] 2. ELISA

[0935] A 96 well Microplate (Costar #2592) was coated with rat anti-human anti-phospho EGFR capture antibody (8.0 μg/mL in PBS, 100 μL/well) (R&D Systems #842428) overnight at room temperature. Each well was aspirated, and washed with wash buffer (0.05% TWEEN® 20 in PBS, pH 7.2-7.4 (R&D Systems #WA126) for a total of five washes. Plates were blocked for 1-2 hours at room temperature with 300 μL of Block Buffer (1% BSA, 0.05% NaN₃ in PBS, pH 7.2-7.4). The wells were aspirated and washed with wash buffer for a total of five washes. Cell lysate (Cetuximab, Y104D anti-EGFR antibody, EGF only or No Rx) was diluted in IC Diluent (1% NP-40 Alternative, 20 mM Tris (pH 8.0), 137 mM NaCl, 10% glycerol, 2 mM EDTA, 1 mM activated sodium orthovanadate) and 100 μL were added. The aspiration and wash steps were repeated, and 100 μL mouse anti-human phospho-EGF R (Y1068) antibody conjugated to HRP (20 mM Tris (pH 8.0), 137 mM NaCl, 0.05% TWEEN® 20, 0.1% BSA) was added. Plates were sealed and incubated for 2 hours at room temperature. The aspiration and wash steps were repeated. Substrate (1:1 mixture of H₂O₂ and Tetramethylbenzidine (R&D Systems, Catalog #DY999)) (100 μL) was added to each well and the plate was incubated for 20 minutes at room temperature. Stop solution (2NH₂SO₄ (R&D Systems, Catalog #DY994) (504) was added, and the optical density (OD) of the wells were measured immediately in a microplate reader set to 450 nm with a wavelength correction at 540 nm or 570 nm.

[0936] 3. Results

[0937] a) A431 Cells

[0938] The results showed that EGF antigen induced phosphorylation of EGFR (see FIG. 3A). In samples from A431 cells pre-treated with antibody at pH 6.5 and 7.4, the results showed that the presence of anti-EGFR Cetuximab antibody inhibited EGF-induced phosphorylation of EGFR such that the levels of phosphorylated EGFR (EGFR-P) was comparable to control cells that were not stimulated with EGF. Pre-incubation of cells with the variant HC-Y104D variant also inhibited EGF-induced phosphorylation, although to a lesser degree than reference Cetuximab. The effect of the variant HC-Y104D on inhibiting EGF-induced phosphorylation of EGFR was greater at pH 6.5.

[0939] The inhibitory effect of the antibodies was dose-dependent (FIG. 3B). The concentration of phosphorylated EGFR was plotted against the concentration of antibody (Cetuximab or HC-Y104D anti-EGFR antibody). For the reference Cetuximab antibody (WT), the inhibitory effect was observed beginning at concentrations of antibody greater than 1 μg/mL and plateaued at concentrations greater than 10 μg/mL. The inhibitory effect of the reference Cetuximab antibody was similar at pH 6.5 and 7.4. For cells pre-incubated with HC-Y104D, the inhibition of EGF-induced phosphorylation was also observed beginning at a concentration of 1 μg/mL, although the inhibition was less than for the reference WT antibody. At 30 μg/mL inhibition had not yet plateaued. The results show, however, that pre-incubation of HC-Y104D at pH 6.5 resulted in a greater inhibitory effect than was observed at pH 7.4.

[0940] b) Neonatal Keratinocytes

[0941] Similar results were observed in samples from Neonatal Keratinocytes (see FIG. 3C). At pH 6.5 and pH 7.4, the reference Cetuximab antibody resulted in a similar inhibition of EGF-induced phosphorylation. At pH 7.4, pre-incubation of cells with the HC-Y104D antibody did not result in any inhibition of EGF-induced phosphorylation. At pH 6.5, however, EGF-induced phosphorylation of EGFR was reduced by approximately one fourth compared to samples without antibody demonstrating that the variant antibody exhibited greater activity at pH 6.5 compared to pH 7.4

### Example 7

### Growth of Human and Neonatal Keratinocytes in the Presence of Cetuximab or HC-Y104D Anti-EGFR Antibody

[0942] The growth of Human neonatal keratinocytes (Invitrogen C-001-5C) and Human adult keratinocytes (Invitrogen C-005-5C) was measured after incubation with Cetuximab or HC-Y104D anti-EGFR antibody. Cetuximab or HC-Y104D anti-EGFR antibody was added to normal growth medium (10% FBS, DMEM (pH 7.4)) to a concentration of 10 μg/mL, 3.33 μg/mL, 1.11 μg/mL, 0.37 μg/mL, 0.123 μg/mL, 0.0411 μg/mL, 0.0137 μg/mL and 0.00457 μg/mL.

[0943] Human neonatal keratinocytes and human adult keratinocytes were added (1000 cells/well) to a 96-well plate (BD Falcon 35-3072) in the presence of the normal growth medium containing Cetuximab or HC-Y104D anti-EGFR antibody. Each condition was assayed in n=5 wells per condition. Cells were incubated for 5 days at 37° C. in a humidified atmosphere of 5% CO₂ incubator. Cell growth was measured by CellTiter-Glo® Luminescent Cell Viability Assay (Promega Cat# G-7571) and expressed as percent surviving cells compared to control cells grown without antibody.

[0944] The results are set forth in Table 21 and FIG. 4. In human adult keratinocytes (FIG. 4A) and neonatal keratinocytes (FIG. 4B), Cetuximab inhibited cell growth in a dose-dependent manner, and the percent surviving cells decreased as the antibody concentration increased. At the highest concentration of Cetuximab (10 μg/mL), 23% surviving cells were observed for human adult keratinocytes and neonatal keratinocytes. In the human adult keratinocytes and neonatal keratinocytes, cell growth did not decrease as the concentration of HC-Y104D anti-EGFR antibody increased. In human adult keratinocytes and neonatal keratinocytes, at antibody concentrations of 0.0411 μg/mL, 0.0137 μg/mL and 0.00457 μg/mL, the percent surviving cells in assays with HC-Y104D was comparable to the percent surviving cells with Cetuximab. At antibody concentrations of 10 μg/mL, 3.33 μg/mL, 1.11 μg/mL, 0.37 μg/mL and 0.123 μg/mL, the percent surviving cells with HC-Y104D anti-EGFR antibody was significantly higher than the percent surviving cells with Cetuximab in human adult keratinocytes and neonatal keratinocytes. This demonstrates that the reference anti-EGFR Cetuximab antibody inhibits the growth of neonatal keratinocytes, but that the anti-EGFR antibody variant HC-Y104D does not.

TABLE 21
Percent surviving cells for adult keratinocytes and neonatal
keratinocytes with Cetuximab and HC-Y104D anti-EGFR antibody

| | Percent surviving cells | | Percent surviving cells | |
|---|---|---|---|---|
| Concentration | (Adult Keratinocytes) | | (Neonatal Keratinocytes) | |
| (μg/mL) | Cetuximab | HC-Y104D | Cetuximab | HC-Y104D |
| 10 | 23% | 87% | 23% | 83% |
| 3.33 | 34% | 103% | 36% | 91% |
| 1.11 | 41% | 90% | 42% | 86% |
| 0.37 | 57% | 117% | 57% | 116% |
| .123 | 62% | 83% | 65% | 98% |
| .0411 | 64% | 65% | 72% | 68% |
| 0.0137 | 65% | 71% | 90% | 82% |
| 0.00457 | 68% | 76% | 104% | 95% |

### Example 8

### Effects of Cetuximab or HC-Y104D Anti-EGFR Antibodies on Tumor Growth in Xenograft Models

[0945] A431 epidermoid carcinoma cells, FaDu hypopharyngeal carcinoma cells, and engineered cell lines A431LDHA and A431CA9, derived from A431 cells, were used to generate xenograft tumor models, which were used to evaluate the antitumor activity of Cetuximab and HC-Y104D anti-EGFR antibodies.

[0946] 1. Subcutaneous A431 Tumors

[0947] An A431 Epidermoid Carcinoma xenograph model was used to evaluate and compare the antitumor activities of Cetuximab and HC-Y104D anti-EGFR antibodies.

[0948] a. Cetuximab Dose Response

[0949] Male, athymic NCr-nu/nu mice were inoculated with a 0.1 mL subcutaneous (SC) injection of 3.3×10⁶ A431 epidermoid carcinoma cells (ATCC CRL1555) suspended in RPMI-1640 medium into their right flanks. When tumors reached a size of ˜100 mm³, animals were randomized into six study groups (n=5/group; 30 total animals) that received either vehicle (Cetuximab buffer), 1.2, 4, 12, 40 or 80 mg/kg body weight Cetuximab by intraperitoneal (IP) administration twice weekly on days 0, 5, 7, 11, and 14 of the study. Tumor growth, measured as tumor volume (mm³), was determined twice per week using digital calipers, with tumor volume calculated according to the formula (½*L*W²), where L (Length) is the longest diameter of the tumor and W (Width) is the longest diameter perpendicular to the “Length” of the measurement. Specifically, tumor volume was measured on days 0, 5, 7, 11 and 14.

[0950] The tumor volume increased linearly over the course of the study in the vehicle only control animals. The tumor volume of the tumors in the mice administered Cetuximab exhibited slower growth at days 5 and 7 than the vehicle only control. After day 7, the tumor growth of the Cetuximab-treated tumors was arrested at the size measured on day 7 for the remainder of the study. The reduction in tumor growth observed was dose-dependent, ranging from a 50% reduction to almost no tumor growth in mice administered Cetuximab at 80 mg/kg body weight.

[0951] b. Cetuximab Vs. HC-Y104D

[0952] The A431 xenograft model was generated as described above. When the tumors reached a size of ˜100 mm³, animals were randomized into five study groups (n=4/group): (1) Group 1—vehicle (Cetuximab buffer), (2) Group 2-0.1 mg/mouse (4 mg/kg body weight) Cetuximab, (3) Group 3-1.0 mg/mouse (40 mg/kg body weight) Cetuximab, (4) Group 4-0.1 mg/mouse (4 mg/kg body weight) HC-Y104D anti-EGFR antibody, or (5) Group 5-1.0 mg/mouse (40 mg/kg body weight) HC-Y104D anti-EGFR antibody. Mice were intraperitoneally (IP) administered 0.1 mg or 1.0 mg of Cetuximab reference or HC-Y104D anti-EGFR antibody variant or vehicle control twice weekly on days 0, 4, 7, 11, and 14. Tumor growth was measured as described above on days 0, 4, 7, 11, 14 and 18, except that in animals treated with vehicle the last tumor measurement was on day 14 because animals were sacrificed. Tumor Growth Inhibition (TGI) for the Cetuximab or HC-Y104D anti-EGFR antibody treatment groups was calculated using the formula: % TGI=[1−(T_{B}−T_{A})/(C_{B}−C_{A})]×100; where T_{B} is the average tumor volume (mm³) in the treatment group at 14 days after initiation of treatment, T_{A} is the average tumor volume (mm³) in the treatment group at day 0 before treatment, C_{B} is the average tumor volume in the control group at 14 days after initiation of treatment, and C_{A} is the average tumor volume in the control group at day 0 before treatment (see, e.g., Teicher BA and Andrews P A: Anticancer Drug Development, Guide: Preclinical Screening, Clinical Trials and Approval, 2^{nf} edition. Humana Press, Totowa, N.J., pp. 134, 2004 and T. Friess et al., (2006) Anticancer Research 26:3505-3512).

[0953] The results showed that in the absence of antibody, tumor volume steadily increased over time in the presence of vehicle only (FIG. 5). Tumor volumes were comparably reduced in animals treated with reference Cetuximab or HC-Y104D anti-EGFR variant antibody compared to vehicle only control at both tested concentrations, with minimal tumor growth occurring in animals treated with 1.0 mg of antibody. On day 14, animals treated with 0.1 mg HC-Y104D anti-EGFR antibody and 0.1 mg Cetuximab had 59% and 68% tumor growth inhibition, respectively. On day 14, animals treated with 1.0 mg HC-Y104D anti-EGFR antibody and 1.0 mg Cetuximab had 88% and 96% tumor growth inhibition, respectively. Thus, the results show that in vivo the efficacy of the HC-Y104D anti-EGFR variant was similar to the reference Cetuximab antibody.

[0954] 2. Subcutaneous FaDu Tumors

[0955] An FaDu hypopharyngeal carcinoma xenograph model was used to evaluate and compare the antitumor activities of Cetuximab and HC-Y104D anti-EGFR antibodies.

[0956] a. Cetuximab Dose Response

[0957] Male, athymic NCr-nu/nu mice were inoculated with a 0.1 mL subcutaneous (SC) injection of 5.0×10⁶ FaDu hypopharyngeal carcinoma cells (ATCC) suspended in RPMI-1640 medium into their right flanks. When tumors reached a size of ˜100 mm³, animals were randomized into five study groups (n=7/group) that received either vehicle (Cetuximab buffer), 1.2, 4, 12, 40, or 80 mg/kg body weight Cetuximab by intraperitoneal (IP) administration twice weekly on days 0, 3, 7, 10, and 14 of the study. Tumor growth was measured as described above on days—1, 3, 7, 10 and 14.

[0958] Animals administered vehicle only exhibited steady growth over the course of the study. The tumors in animals administered 1.2 mg/kg Cetuximab grew about 50% less rapidly than the vehicle-treated controls. Administration of 4, 12, 40, or 80 mg/kg Cetuximab completely arrested the tumor growth at all time points measured. These results indicate that the FaDu xenograft model is more sensitive to Cetuximab than the A431 xenograft model.

[0959] b. Cetuximab vs. HC-Y104D

[0960] The FaDu xenograft model was generated as described above. When the tumors reached a size of ˜100 mm³, animals were randomized into five study groups (n=4/group): (1) Group 1—vehicle (Cetuximab buffer), (2) Group 2—4 mg/kg Cetuximab, (3) Group 3—40 mg/kg Cetuximab, (4) Group 4—4 mg/kg HC-Y104D anti-EGFR antibody, or (5) Group 5—40 mg/kg HC—Y104D anti-EGFR antibody. The antibodies or vehicle only were administered intraperitoneally (IP) twice weekly on days 0, 3, 7, and 10. Tumor growth was measured using calipers as described above on days—1, 3, 7, 10, 14 just prior to antibody administration.

[0961] Animals administered vehicle only exhibited steady growth over the course of the study. Treatment with 4 mg/kg or 40 mg/kg of variant anti-EGFR steadily reduced the tumor growth over time with about 40% and 70%, respectively, reduction in tumor growth at day 14. Treatment with 4 mg/kg or 40 mg/kg Cetuximab completely arrested the tumor growth for the course of the study.

### Example 9

### Binding of Anti-EGFR Antibody Y104D to A431 Subcutaneous Tumors or Skin Grafts Ex Vivo

[0962] 1. Ex Vivo Binding Studies to Subcutaneous Tumors

[0963] a. EGFR Expression in Subcutaneous Tumors

[0964] Immunohistochemistry (IHC) was used to assess the levels of EGFR expression in A431 human tumors grown as xenografts in nude mice as described in Example 8.1. A431 subcutaneous tumors were harvested and fixed in 10% neutral buffered formalin (NBF) and embedded in paraffin. Five (5) μm sections were mounted on slides and dried. Prior to staining, the slides were deparaffinized and rehydrated. Sections were immunolabeled using an EGFR IHC kit (Dako, Carpinteria, Calif.). Staining was visualized with 3,3′-diaminobenzidine (DAB) according to the manufacturer's instructions. Nuclei were counterstained with hematoxylin. Micrographs were captured with a Nikon Eclipse TE2000U microscope coupled to a Insight FireWire digital camera (Diagnostic Instruments, Michigan) The intense cell membrane positivity for EGFR in the tumor cells confirmed that xenograft tumors derived from A431 cells retain high levels of EGFR expression.

[0965] b. Binding of Anti-EGFR Antibodies to Subcutaneous Tumors

[0966] Immunofluorescence (IF) was used to assess the ability of Cetuximab and HC-Y104D to bind, and therefore label, human EGFR. Erbitux and HC-Y104D were conjugated to DyLight⁵⁹⁴ at 10, 5, 1, 0.3, 0.1 μg/mL in PBS using the DyLight 594 Antibody Labeling Kit (Thermo Scientific; Rockford, Ill.), according to the manufacturer's instructions. Following sectioning, frozen sections of A431 tumors were fixed for 10 min in cold acetone and incubated for one hour with 5 μg/mL or 1 μg/mL of either DyLight⁵⁹⁴-conjugated Cetuximab or HC-Y104D antibody. After washing in PBS, sections were counter-stained with DAPI (4′,6-Diamidino-2-Phenylindole, Dihydrochloride) (Molecular Probes, Eugene). Micrographs were captured, with 20× and 40× objectives, using a Nikon Eclipse TE2000U microscope coupled to a Insight FireWire digital camera (Diagnostic Instruments, Michigan) using the same settings for each image to allow for comparison between experimental conditions.

[0967] Both Cetuximab and HC-Y104D antibodies demonstrated intense immunolabeling of the A431 solid tumors. The labeling intensity with the HC-Y104D antibody was lower compared to that of Cetuximab at each concentration (5 μg/mL and 1 μg/mL), although the intensity obtained with 5 μg/mL HC-Y104D antibody was comparable to that observed using 1 μg/mL Cetuximab.

[0968] 2. Ex Vivo Binding Studies to Primate Skin

[0969] a. EGFR Expression in Primate Skin

[0970] Immunohistochemistry (IHC) was used to assess the levels of EGFR expression in human and non human primate skin samples. Human skin samples were obtained from a local surgical center; cynomolgus monkey, marmoset monkey and squirrel monkey skin were received from Worldwide Primates Inc. (Miami, Fla.). Formaldehyde fixed samples of human, cynomolgus monkey, marmoset monkey and squirrel monkey were sectioned and processed for IHC with the EGFR IHC kit (DAKO) as described above. Nuclei were counterstained with hematoxylin. Micrographs were captured above, with 20× and 40× objectives.

[0971] As expected, the membranes of the basal keratinocytes exhibited intense staining for EGFR. The basal keratinocytes of cynomolgus and squirrel monkey skin tissues also exhibited staining, with the cynomolgus skin staining with slightly less intensity than that observed for human and squirrel monkey tissues. The marmoset monkey skin did not exhibit any detectable staining, even when using a 40× objective. These results indicate that cynomolgus monkey and squirrel monkey EGFR, but not Marmoset monkey EGFR, are sufficiently similar to human EGFR to be recognized by the anti-human EGFR monoclonal antibody.

[0972] b. Binding of Anti-EGFR Antibodies to Frozen Skin Samples

[0973] Immunofluorescence (IF) was used to assess the ability of Cetuximab and HC-Y104D to bind, and therefore label, human EGFR in skin samples. Cryosections of human, cynomolgus monkey, marmoset monkey and squirrel monkey (human skin received from a local surgical center; cynomolgus monkey, marmoset monkey and squirrel monkey skin received from Worldwide Primate, Florida), were directly immunolabeled at neutral pH as described above, using 1.0 μg/mL Cetuximab or HC-Y104D conjugated to Alexafluor 594 (Thermo Scientific DyLight 594 Antibody Labeling Kit; Rockford, Ill.). Nuclei were counterstained with DAPI. Micrographs were captured as described above, using 20× and 40× objectives.

[0974] Cetuximab demonstrated intense immunolabeling of pre-keratinocytes and basal cells in the human tissue and, to a lesser extent, in cynomolgus skin samples. HC-Y104D antibody demonstrated much lower immunolabeling intensity of the pre-keratinocytes and basal cells in the dermis of human skin and cynomolgus monkey skin compared to Cetuximab-labeled sections. Neither Cetuximab nor HC-Y104D exhibited detectable labeling in squirrel monkey skin nor marmoset monkey skin.

### Example 10

### Selective Binding of Fluorescently-Labeled Anti-EGFR Antibody Y104D to Tumors Versus Skin In Vivo

[0975] Cetuximab, Y104D anti-EGFR antibody, and a control Human IgG were labeled at room temperature for 60 minutes with DyLight755 Sulfydryl-Reactive Dye (DL755) (Thermo Scientific, Rockford, Ill.), a near-IR fluor. The binding of DL755 labeled IgG, Cetuximab, and HC-Y104D to xenograft tumors or human or monkey skin grafts was assessed using the IVIS Caliper fluorescent imaging system with an excitation wavelength of 745 nm and an emission wavelength of 800 nm. Images were captured before administration of antibody and at 1 minute, 2 minutes, 10 minutes, 60 minutes, 120 minutes, 240 minutes, 360 minutes, 1 day, and daily after administration of the antibodies. In the human skin graft models, images were also captured at 10 days post administration of the antibodies.

[0976] 1. Cetuximab and HC-Y104D Binding to Subcutaneous A431 Tumors

[0977] A431 xenograft tumors were produced by injecting A431 cells into the right flanks of nude mice as described in Example 8 above. 21 days post-implantation, the mice were administered 10 μg/mouse (0.5 mg/kg) Human IgG^{DL755}, HC-Y104D^{DL755}, or Ceuximab^{DL755} (n=4/group). The DL755 label was detected, in 4 animals/group, using the IVIS Caliper fluorescent imaging system with an excitation wavelength of 745 nm and an emission wavelength of 800 nm. Images were captured before administration of antibody and at 4 hr after administration of the antibodies, and then daily for 7 days.

[0978] The binding of the negative control antibody, human IgG^{DL755},to the tumor mass was minimal at 4 hr post-administration, but increased slightly (about 3 fold) over the 7 days of the study. The binding demonstrated by Cetuximab^{DL755} was greater than that for Y104D^{DL755} for the first 4 days of the study, reaching a peak intensity of about 13 times greater than the baseline signal (the IgG^{DL755} signal at 4 hr post administration) on day 4. After day 4, the Cetuximab signal decreased slightly to approximately 11-11.5 times the baseline signal. The signal for tumor-bound Y104D^{DL755} increased steadily over the course of the study to about 11-11.5 fold greater than baseline on days 6 and 7. The signals from both anti-EGFR antibodies (Cetuximab^{DL755} and Y104D^{DL755}) covered the entire surface of the tumors and were much greater than the signal detected for tumor-bound IgG^{DL755} at every time point.

[0979] Immunohistochemical staining of human IgG^{DL755}, HC-Y104D^{DL755}, and Ceuximab^{DL755}-injected mice, by F_{c} detection, was used to assess the localization of antibody binding in more detail. As described above, nude mice were injected with A431 cells in the right flanks to generate A431 tumors. On day 21 post-A431 cell implantation, the mice were administered a single i.v. dose of IgG^{DL755}, Y104D^{DL755}, or Cetuximab^{DL755} at 1 mg/mouse (n=2/group). 48 hr after the dose of antibody, the tumors were visualized using the IVIS Caliper fluorescent imaging system as described above. Following tumor imaging, the mice were perfused, the tumors were harvested, and cryosections of the tumor were incubated with HRP-conjugated goat anti-human IgG secondary antibody for detection of the F_{c} regions of the injected antibodies using standard methods as described above. DAB was used as the HRP substrate to enable visualization. The stained tissues were examined using a Nikon Eclipse TE2000U microscope coupled to a Insight FireWire digital camera (Diagnostic Instruments, Michigan) equipped with a 20× objective.

[0980] The tumors from animals injected with IgG^{DL755} exhibited diffuse, non-specific IgG staining. In contrast, the tumors injected with Y104D^{DL755} or Cetuximab^{DL755} exhibited distinct, membrane-specific binding. These results are consistent with Y104D^{DL755} and Cetuximab^{DL755} antibodies binding the EGFR target on the surface of cell membranes in the A431 tumors.

[0981] 2. Cetuximab and HC-Y104D Binding to Subcutaneous PC-3 Tumors

[0982] Xenograft tumors derived from PC-3 cells were generated by injecting 2×10⁶ PC-3 cells (Caliper Life Sciences), in 100 μl serum-free Opti-MEM®, into the right peritibial muscle of male nude mice. 35 days after implantation, the PC-3 tumor bearing mice were administered 10 μg/mouse (0.5 mg/kg) human IgG^{DL755}, HC-Y104D^{DL755}, or Ceuximab^{DL755} (n=2/group), and the DL755 label was detected using the IVIS Caliper fluorescent imaging system as described above. Images were captured before administration of antibody and then daily for 5 days. A parallel immunohistochemical study also was performed on the PC-3 xenograft tumors, 48 hr. following 1 mg/mouse i.v. administrations of human IgG (control), HC-Y104D, or Cetuximab by F_{c} detection as described above.

[0983] Mice administered human IgG^{DL755} exhibited some low DL755 signal that localized to the tumor site. Mice administered HC-Y104D^{DL755} or Cetuximab^{DL755} exhibited more tumor-localized DL755 signal than that observed in animals administered human IgG^{DL755}, but the signals were reduced compared to the corresponding signals observed in Example 9.2.a. The F_{c}-detection immunohistochemical study revealed non-specific staining for all three antibodies. No membrane-specific staining was observed, indicating human IgG, HC-Y104D, and Cetuximab may generally accumulate within EGFR poor PC3 tumors, rather than specifically binding to the tumor surface.

[0984] As a model to assess skin toxicity, binding of a fluorescently-labeled Cetuximab and HC-Y104D anti-EGFR antibody to human and monkey skin grafts implanted in mice was assessed in vivo. Cetuximab, Y104D anti-EGFR antibody, and a control Human IgG were labeled at room temperature for 60 minutes with DyLight755 Sulfydryl-Reactive Dye (DL755) (Thermo Scientific, Rockford, Ill.), a near-IR fluor.

[0985] 3. Binding of Cetuximab and HC-Y104D Anti-EGFR Antibodies to Human Skin Grafts

[0986] Human split thickness skin graft (STSG) (human skin received from a local surgical center) and human foreskin grafts (purchased from NDRI (1628 JFK Blvd, 8 Penn Center, Philadelphia, Pa.) were surgically transplanted on the left dorsal flank in Ncr nu/nu mice. EGFR expression was confirmed in the human skin grafts on days 70 and 32 post implantation, respectively, by anti-EGFR IHC kit (Dako). On day 32 and day 36 post-implantation, the labeled antibodies were administered by i.v. to mice with human skin grafts at a dose of 300 μg/mouse.

[0987] In the human STSG mouse models, a circulating systemic signal was observed in all mice at one hour post administration, consistent with circulating labeled antibody. This circulating signal lasted for approximately 7 or 8 days. In mice administered DL755 labeled Cetuximab, on day 1 post-administration, signal with greater intensity than the systemic signal was detected at the site of the skin graft. This signal was visible in the images taken on each of days 1-10 post-administration. In mice administered HC-Y104D modified anti-EGFR antibody or control human IgG antibody, at all time points tested, very minimal signal above the systemic signal was observed at the skin graft locations. At each time point measured, signal at the site of the tumor graft was significantly greater in mice administered the Cetuximab antibody than in mice administered the HC-Y104D modified anti-EGFR antibody.

[0988] These results were confirmed in a follow-up study, wherein on day 21 post implantation, mice receiving human foreskin grafts were analyzed for antibody binding, using the same method (n=3/group), before and 4 hr after intravenous administration of 10 μg/mouse (0.5 mg/kg) human IgG^{DL755}, Y104D^{DL755}, or Cetuximab^{DL755} and then daily thereafter for a total of 6 days. At day 1 post-administration, signal with greater intensity than the systemic signal was detected at the site of the skin graft in mice administered Y104D^{DL755} or Cetuximab^{DL755}. The skin graft binding, evidenced by signal intensity, in Cetuximab^{DL755}-administered mice increased until day 3 and then remained at the same level for the remaining 3 days of the study. The skin graft binding in mice administered Y104D^{DL755}, remained about the level observed at day 1 for the remaining days of the study. Minimal binding of human IgG^{DL755} to the skin graft was observed over the course of the study. These results indicate Cetuximab^{DL755} exhibits greater binding to epitopes in human skin than Y104D^{DL755}. The binding results of IgG^{DL755}, Y104D^{DL755}, or Cetuximab^{DL755} to human foreskin grafts were verified by immunohistochemistry. On day 28 post-implantation, mice receiving human foreskin grafts were administered a single i.v. dose of IgG, Y104D, or Cetuximab at 1 mg/mouse. 48 hr after the dose of antibody, the mice were perfused and cryosections were incubated with HRP-conjugated goat anti-human IgG secondary antibody. DAB was used as the HRP substrate. The stained tissues were examined using a Nikon Eclipse TE2000U microscope coupled to a Insight FireWire digital camera (Diagnostic Instruments, Michigan) equipped with a 40× objective. Consistent with the in vivo studies, tissues from mice administered Cetuximab exhibited the most binding to the human skin graft; tissues from mice administered Y104D exhibited much reduced staining compared to the Cetuximab-treated sections; and staining was undetectable in tissues of mice administered human IgG.

[0989] 4. Binding of Cetuximab and HC-Y104D Anti-EGFR Antibodies to Monkey Skin Grafts

[0990] Monkey STSG (cynomolgus monkey skin received from BioTox) were surgically transplanted on the left dorsal flank in 7 Ncr nu/nu mice. EGFR expression was confirmed in the monkey skin grafts on days 70 and 32 post implantation, respectively, by anti-EGFR IHC kit (Dako). On day 32 and day 36 post-implantation, the labeled antibodies were administered by i.v. to mice with monkey skin graft models at a dose of and 30 μg/mouse.

[0991] In mice containing monkey STSG skin grafts, a circulating systemic signal was observed in all mice at one hour post administration, consistent with circulating labeled antibody. This circulating signal lasted for approximately 5-7 days. In mice administered DL755 labeled Cetuximab, signal above the systemic signal was detected in the skin graft on each of days 1-9 post-administration. In mice administered HC-Y104D modified anti-EGFR antibody, signal above the systemic signal was detected on each of days 1-9 post-administration, but with significantly less intensity on all days measured than the signal observed in mice that were administered Cetuximab. In mice administered control human IgG antibody, only a faint signal was observed at the skin graft location on each of days 1-9.

[0992] 5. A431 Tumor Vs. Skin Binding

[0993] The quantitated fluorescent signal intensities were used to determine the ratio of antibody tumor:skin binding for Cetuximab and HC-Y104D antibodies by dividing the DL755 signal intensity of the tumor binding, determined in Example 10.1, by the corresponding DL755 signal intensity of the human skin graft binding from the same antibody determined in Example 10.2 (n=2/group). The ratios were then normalized to the tumor:skin binding ratio calculated for the control IgG-administered animals.

[0994] The results are set forth in FIG. 6. The Cetuximab tumor binding was approximately equal to the skin binding at all time points, yielding a tumor:skin binding ratio of approximately 1 at each time point. In contrast, HC-Y104D tumor binding was much greater than Y104D skin binding. The tumor:skin binding ratio was approximately 4 to 5.5 at each time point. These results demonstrate that HC-Y104D preferentially and selectively binds the tumor cells compared to the skin graft.

### Example 11

### Effects of Cetuximab on Skin Toxicity in a Skin Graft Model

[0995] Donor skin from the palpebral fissure of a patient was harvested and a split thickness skin grafts were transplanted to 4 Ncr nu/nu mice. Starting on day 15 post skin transplantation, two of the mice were each intravenously administered 2 mg Cetuximab (100 mg/kg, HED 60 mg/kg) twice weekly for 4 weeks. On day 35 post-Cetuximab, 7 days after the final dose of Cetuximab, the condition of the skin grafts were visually assessed. Samples of donor skin and grafted skin, containing both the human donor skin graft and the host mouse skin, were collected and analyzed by immunohistochemistry using the anti-EGFR IHC kit (Dako).

[0996] On day 35 post commencement of Cetuximab treatment, the skin grafts of the mice that did not receive Cetuximab, were integrated into the skin. In contrast, the skin grafts of mice receiving Cetuximab, on day 35 post commencement of treatment, had shrunk to less than half the size of the original skin graft and the interface between the skin graft and the host skin was red and irritated, indicating Cetuximab stimulated a response against the human tissue.

[0997] IHC analysis of the donor skin revealed strong HuEGFR staining. IHC analysis of the graft site, containing a region of both human graft and mouse skin, revealed strong HuEGFR staining in the human graft pre-keratinocytes and basal cells and no staining in the mouse pre-keratinocytes or basal cells of the adjacent mouse skin.

### Example 12

### Anti-EGFR Antibody and Chemotherapy Combinatorial Treatment

[0998] The efficacies of Cetuximab and HC-Y104D anti-EGFR antibodies in combination with the chemotherapeutic reagent, cisplatin, were evaluated for the inhibition of A431 xenograft tumor growth.

[0999] 1. Cetuximab and Cisplatin

[1000] Subcutaneous A431 xenograft tumors were established in male nude mice as described in Example 8 above. When the tumors were approximately 100-200 mm³ in size, animals were randomized into nine study groups (n=5/group), as set forth in Table 22, and administered Cetuximab by intraperitoneal administration twice per week and/or cisplatin twice per week by intravenous administration. Specifically, the test article(s) were administered on days 0, 4, 7, 11, and 14.

TABLE 22
Cetuximab and/or Cisplatin Dose and
Resulting Tumor Growth Inhibition

| | | Cetuximab | | Cisplatin | | |
|---|---|---|---|---|---|---|
| | | Dose | | Dose | | % Tumor |
| | Test | mg/ | mg/ | mg/ | mg/ | Growth |
| Group | Article(s) | mouse | kg | mouse | kg | Inhibition |
| 1 | Vehicle | — | — | — | — | — |
| 2 | Cetuximab | 0.1 | 4 | — | — | 41.8 |
| 3 | Cetuximab | 0.3 | 12 | — | — | 65.9* |
| 4 | Cisplatin | — | — | 0.04 | 1.5 | 16.7 |
| 5 | Cisplatin | — | — | 0.125 | 5 | 34.2* |
| 6 | Cetuximab + | 0.1 | 4 | 0.04 | 1.5 | 53.2* |
| | Cisplatin | | | | | |
| 7 | Cetuximab + | 0.1 | 4 | 0.125 | 5 | 50.2* |
| | Cisplatin | | | | | |
| 8 | Cetuximab + | 0.3 | 12 | 0.04 | 1.5 | 74.1* |
| | Cisplatin | | | | | |
| 9 | Cetuximab + | 0.3 | 12 | 0.125 | 5 | 85.2* |
| | Cisplatin | | | | | |

*= p < 0.05 vs. vehicle only

[1001] Tumor growth, measured as tumor volume (mm³), was determined on days—1, 4, 7, 11 and 14 using digital calipers and calculation as described in Example 8. Tumor growth inhibition (TGI) for the treatment groups was calculated using the formula: % TGI=[1−(T_{B}−T_{A})/(C_{B}−C_{A})]×100; where T_{B} is the average tumor volume (mm³) in the treatment group at day 14, T_{A} is the average tumor volume (mm³) in the treatment group the day before the first treatment (day—1), C_{B} is the average tumor volume in the vehicle only control group at day 14, and C_{A} is the average tumor volume in the vehicle only control group the day before the first treatment (day—1) (see, e.g., Teicher B A and Andrews P A: Anticancer Drug Development, Guide: Preclinical Screening, Clinical Trials and Approval, 2^{nd} edition. Humana Press, Totowa, N.J., pp. 134, 2004 and T. Friess et al., (2006) Anticancer Research 26:3505-3512). The results are set forth in Table 22 above.

[1002] While 1.5 mg/kg cisplatin did not significantly inhibit tumor growth on its own, it did contribute to additional tumor growth inhibition when in combination with Cetuximab at 4 mg/kg (41.8% TGI for Cetuximab alone vs. 53.2% TGI for the combination) and at 12 mg/kg (65.9% TGI for Cetuximab alone vs. 74.1% TGI for the combination). Treatment with 5 mg/kg cisplatin alone resulted in 34.2% TGI and further contributed to TGI when in combination with Cetuximab at 4 mg/kg (41.8% TGI for Cetuximab alone vs. 50.2% TGI for the combination) and at 12 mg/kg (65.9% TGI for Cetuximab alone vs. 85.2% TGI for the combination). The maximum tumor growth inhibition was observed with 12 mg/kg Cetuximab +5 mg/kg cisplatin.

[1003] 2. Cetuximab Vs. HC-Y104D and Cisplatin

[1004] Subcutaneous A431 xenograft tumors were established in male nude mice as described above. When the tumors were approximately 100 mm³ in size, animals were randomized into eight study groups (n=5/group), as set forth in Table 23, and administered Cetuximab or HC-Y104D, by IP administration, and/or cisplatin, by IV administration, twice per week. Specifically, the test article(s) were administered on days 0, 4, 7 and 11. Tumor volume (mm³) was determined on days—1, 4, 7, 11 and 14 as described previously.

TABLE 23
Cetuximab, HC-Y104D and/or Cisplatin Dose

| | | Cetuximab | | HC-Y104D | | Cisplatin | |
|---|---|---|---|---|---|---|---|
| | | Dose | | Dose | | Dose | |
| | Test | mg/ | mg/ | mg/ | mg/ | mg/ | mg/ |
| Group | Article(s) | mouse | kg | mouse | kg | mouse | kg |
| 1 | Vehicle | — | — | — | — | — | — |
| 2 | Cetuximab | 0.3 | 12 | — | — | — | — |
| 3 | Cisplatin | — | — | — | — | 0.125 | 5 |
| 4 | Y104D | — | — | 0.3 | 12 | — | — |
| 5 | Y104D | — | — | 1.0 | 40 | — | — |
| 6 | Cetuximab + | 0.3 | 12 | — | — | 0.125 | 5 |
| | Cisplatin | | | | | | |
| 7 | Y104D + | — | — | 0.3 | 12 | 0.125 | 5 |
| | Cisplatin | | | | | | |
| 8 | Y104D + | — | — | 1.0 | 40 | 0.125 | 5 |
| | Cisplatin | | | | | | |

[1005] The average tumor volume of vehicle treated animals grew progressively over the course of the study until it reached approximately 2200 mm³ on day 14. Administration of 5 mg/kg cisplatin reduced the tumor growth by about 45% by day 14. The tumors of mice receiving doses of 12 mg/kg Cetuximab exhibited about a 80% reduction in tumor growth. In this experiment no additive effect was observed for the combined treatment of 12 mg/kg Cetuximab and 5 mg/kg cisplatin. The tumors of mice receiving 12 mg/kg HC-Y104D were reduced in size by about 55% compared to the vehicle control group. The additional treatment of 5 mg/kg cisplatin did not reduce the tumor growth any further than was observed for 12 mg/kg HC-Y104D alone. Increasing the dose of HC-Y104D to 40 mg/kg yielded tumor growth inhibition that was similar to that observed for 12 mg/kg Cetuximab. There was no additional tumor inhibition observed when 40 mg/kg HC-Y104D was administered in combination with 5 mg/kg cisplatin.

### Example 13

### Effect of Anti-EGFR Antibody-Drug Conjugates (ADCs) on Tumor Cell and Keratinocyte Cell Growth Inhibition

[1006] Anti-EGFR antibody-drug conjugates (ADCs) were generated by fusing the immunotoxin Saporin to Cetuximab, HC-Y104D and HC-Y104D/Q111P anti-EGFR antibodies by either mixing biotinylated antibodies and streptavidin-Saporin (Advanced Targeting Systems Bio, Cat# IT-27) or using a cleavable protein cross-linker (service provided by Advanced Targeting Systems Bio) to permit drug release inside the target cells.

[1007] For biotin-streptavidin based ADC formation, antibodies at a concentration of 1-2 mg/ml in 0.1 M phosphate buffer, pH 7.2 were oxidized, converting adjacent hydroxyl groups of the antibody sugar chains into aldehyde groups, using sodium periodate (NaIO₄) at a final concentration of 5 mg/ml, 4° C. for 30 min. The oxidized antibodies were dialyzed against 0.1 M phosphate buffer, pH 7.2. The dialyzed antibodies were then mixed with 50 mM hydrazide-biotin prepared in DMSO at volume ratio 9 to 1, resulting in 5 mM hydrazide-biotin in the reaction, and incubated at room temperature for 2 hours to form hydrazone bonds between the aldehyde groups of the antibodies and hydrazide groups. The biotinylated antibodies were dialyzed against 1×PBS, and mixed with streptavidin-saporin in equal molar ratio to form the antibody-saporin complex. The ADCs were then tested for their abilities to inhibit cell growth of human tumor cell lines, A431 and MDA-MB-468, and a human keratinocyte cell line, HEK-N.

[1008] 1. Saporin ADC Inhibition of A431 Cell Growth

[1009] A431 cells were cultured in RPMI 1640 medium supplemented with 10% fetal bovine serum (FBS; Mediatech). The day before ADC treatment, A431 cells were seeded at 1,000 cells/well in 200 μL volume in clear bottom white 96-well plates. The cells were left untreated or were treated with the Saporin conjugated Cetuximab (Wt-Sap), Saporin conjugated Y104D (Y104D-Sap), Saporin conjugated Y104D/Q111P (YDQP-Sap), or Saporin-conjugated human IgG at increasing concentrations starting from 1 μg/mL. The cells were subjected to ADC treatment for 5 days. Live cells were measured on day 5 using the Cell Titer-glo Luminescent kit (Promega) according to the manufacturer's instructions. The percentages of surviving cells were calculated relative to untreated cells and EC50 values were computed using GraphPad Prism. The results are set forth below in Table 24. The results show that WT-Sap showed similar cell growth inhibition (CGI) activity as Y104D-Sap and TDQP-Sap on A431 Cancer cells.

[1010] 2. Saporin ADC Inhibition of Neonatal Keratinocyte (HEK-N) Cells

[1011] Neonatal Keratinocyte (HEK-N) cells were cultured in growth factor supplemented Epilife medium (Gibco). The day prior to Saporin ADC treatment, HEK-N cells were seeded at 1,000 cells/well in 200 μl, volume in clear bottom white 96-well plates. The cells were left untreated or were treated with the Saporin conjugated Cetuximab (Wt-Sap), Saporin conjugated Y104D (Y104D-Sap), Saporin conjugated Y104DQ111P (YDQP-Sap), or Saporin-conjugated human IgG at increasing concentrations starting from a concentration of 1 μg/mL. The cells were subjected to ADC treatment for 5 days. Live cells were measured on day 5 using the Cell Titer-glo Luminescent kit (Promega) according to the manufacturer's instructions. The percentages of surviving cells were calculated relative to untreated cells and EC50 values were computed using GraphPad Prism. The results are set forth in Table 24. The results show that WT-Sap showed much greater (CGI) activity than Y104D-Sap and TDQP-Sap on keratinocytes.

TABLE 24
EC50 for Cell Growth Inhibition (CGI) ng/mL)

| | WT-Sap | Y104D-Sap | YDQP-Sap |
|---|---|---|---|
| A431 | 0.7 | 1 | 2.4 |
| Keratinocyte | 0.2 | 15.8 | 22.5 |

### Example 14

### Generation and Screening of a Second Combinatorial Library

[1012] A second generation library of combinatorial anti-EGFR antibody mutants was generated to provide additional mutant anti-EGFR antibody candidates. The candidates were tested for selective binding under reduced pH conditions.

[1013] 1. Second Library Construction

[1014] The second combinatorial library was generated by generating full-length anti-EGFR antibody mutants HC-S053G/Y104D and HC-S053G/Y104D/Q111P by site directed mutagenesis of HC-Y104D and HC-Y104D/Q111P using methods described in Example 2. The newly generated mutants and previously generated HC-Y104D and HC-Y104D/Q111P were then used as parental clones to which the mutations S025V, F027G, T030F and D072L were individually added to generate a library of 20 constructs as outlined in Table 25. All constructs were sequence verified.

[1015] 2. Screening of Second Combinatorial Library

[1016] The constructs of the second combinatorial library and Cetuximab were transfected into CHO cells, using standard transfection procedures as described in Example 1 above, and the expression of the antibodies was determined by measuring the concentration in the supernatant as previously described (Example 1). The Results are set forth in Table 25. The results show that many clones of the mini-CPS library exhibit low expression.

TABLE 25
Constructs of Second Combinatorial Library

| | | | Trans- | Trans- |
|---|---|---|---|---|
| | | SEQ | fection 1 | fection 2 |
| Clone # | | ID NO | (ng/mL) | (ng/mL) |
| 2-1 | HC-Y104D | | 320.7 | 246.2 |
| 2-2 | HC-Y104D/Q111P | | 196.8 | 94.5 |
| 2-3 | HC-S053G/Y104D | | 341.8 | 223.7 |
| 2-4 | HC-S053G/Y104D/Q111P | | 298.5 | 157.5 |
| 2-5 | HC-S025V/Y104D | | 36.2 | 12.1 |
| 2-6 | HC-S025V/Y104D/Q111P | | 40.1 | 15.5 |
| 2-7 | HC-S025V/S053G/Y104D | | 87.5 | 36.0 |
| 2-8 | HC-S025V/S053G/ | | 70.3 | 38.8 |
| | Y104D/Q111P | | | |
| 2-9 | HC-F027G/Y104D | | 0.7 | 3.5 |
| 2-10 | HC-F027G/Y104D/Q111P | | 0.5 | 2.4 |
| 2-11 | HC-F027G/S053G/Y104D | | 15.1 | 14.8 |
| 2-12 | HC-F027G/S053G/ | | 13.3 | 0.5 |
| | Y104D/Q111P | | | |
| 2-13 | HC-T030F/Y104D | | 68.3 | 56.5 |
| 2-14 | HC-T030F/Y104D/Q111P | | 49.6 | 32.3 |
| 2-15 | HC-T030F/S053G/Y104D | | 67.3 | 69.2 |
| 2-16 | HC-T030F/S053G/ | | 100.2 | 74.9 |
| | Y104D/Q111P | | | |
| 2-17 | HC-D072L/Y104D | | 31.0 | 28.1 |
| 2-18 | HC-D072L/Y104D/Q111P | | 10.3 | 0.5 |
| 2-19 | HC-S053G/D072L/Y104D | | 61.6 | 46.5 |
| 2-20 | HC-S053G/ | | 55.9 | 18.9 |
| | D072L/Y104D/Q111P | | | |

[1017] The supernatants were then adjusted to concentrations of 4 ng/mL, 2 ng/mL and 1 ng/mL for testing EGFR binding at pH 6.0 and pH 7.4 using pH sensitive ELISA as described in Example 1. The transfection and pH sensitive ELISA were conducted twice for each construct at each concentration. The screening results are set forth in Table 26. The concentration of clones 2-9 and 2-10 were extremely low and were tested undiluted and at dilutions of 1:2 and 1:4.

[1018] Cetuximab bound EGFR similarly at pH 6.0 and pH 7.4. All mutant clones exhibited lower binding at pH 6.0 compared to clones HC-Y104D and HC-Y104D/Q111P, but some clones demonstrated binding at pH 7.4 that was reduced to background levels, resulting in higher pH 6.0/pH 7.4 ratios.

TABLE 26

| | | OD, pH 6.0 | | | | | | OD, pH 7.4 | | | | | | pH 6.0/pH 7.4 OD ratio | | |
|---|---|---|---|---|---|---|---|---|---|---|---|---|---|---|---|---|
| | | 4 | | 2 | | 1 | | 4 | | 2 | | 1 | | 4 | 1 | 1 |
| clone | mutation | ng/mL | | ng/mL | | ng/mL | | ng/mL | | ng/mL | | ng/mL | | ng/mL | ng/mL | ng/mL |
| Cetuximab | | 2.40 | 2.39 | 1.99 | 1.92 | 1.41 | 1.33 | 2.15 | 2.15 | 1.70 | 1.74 | 1.15 | 1.09 | 1.11 | 1.14 | 1.22 |
| 2-1 | HC-Y104D | 2.29 | 2.27 | 1.84 | 1.80 | 1.24 | 1.27 | 1.33 | 1.18 | 0.67 | 0.75 | 0.45 | 0.42 | 1.82 | 2.55 | 2.88 |
| 2-2 | HC-Y104D/Q111P | 2.27 | 2.23 | 1.71 | 1.70 | 1.14 | 1.21 | 0.81 | 0.76 | 0.43 | 0.39 | 0.16 | 0.20 | 2.87 | 4.18 | 6.55 |
| 2-3 | HC-S053G/Y104D | 1.36 | 1.51 | 0.74 | 0.86 | 0.46 | 0.47 | 0.12 | 0.14 | 0.08 | 0.08 | 0.07 | 0.07 | 11.11 | 10.17 | 6.58 |
| 2-4 | HC-S053G/Y104D/ | 0.89 | 0.85 | 0.56 | 0.43 | 0.21 | 0.29 | 0.08 | 0.10 | 0.07 | 0.08 | 0.07 | 0.07 | 9.78 | 6.65 | 3.45 |
| | Q111P | | | | | | | | | | | | | | | |
| 2-1 | HC-Y104D | 2.27 | 2.26 | 1.62 | 1.74 | 1.09 | 1.09 | 0.71 | 0.81 | 0.45 | 0.45 | 0.24 | 0.25 | 2.99 | 3.73 | 4.42 |
| 2-2 | HC-Y104D/Q111P | 2.05 | 2.09 | 1.50 | 1.51 | 1.01 | 0.94 | 0.34 | 0.30 | 0.16 | 0.16 | 0.11 | 0.09 | 6.43 | 9.34 | 9.93 |
| 2-5 | HC- S025V/Y104D | 1.61 | 1.59 | 1.06 | 1.02 | 0.56 | 0.59 | 0.21 | 0.23 | 0.10 | 0.10 | 0.07 | 0.08 | 7.23 | 10.49 | 7.49 |
| 2-6 | HC- S025V/Y104D/ | 1.51 | 1.54 | 0.92 | 0.94 | 0.54 | 0.54 | 0.16 | 0.13 | 0.08 | 0.09 | 0.07 | 0.07 | 10.32 | 10.70 | 7.65 |
| | Q111P | | | | | | | | | | | | | | | |
| 2-7 | HC- S025V/S053G/ | 1.37 | 1.37 | 0.38 | 0.48 | 0.14 | 0.17 | 0.07 | 0.07 | 0.07 | 0.07 | 0.06 | 0.07 | 18.76 | 6.27 | 2.32 |
| | Y104D | | | | | | | | | | | | | | | |
| 2-8 | HC- S025V/S053G/ | 0.15 | 0.17 | 0.10 | 0.11 | 0.09 | 0.08 | 0.06 | 0.07 | 0.06 | 0.06 | 0.05 | 0.05 | 2.57 | 1.89 | 1.57 |
| | Y104D/Q111P | | | | | | | | | | | | | | | |
| 2-11 | HC- F027G/S053G/ | 0.08 | 0.08 | 0.08 | 0.08 | 0.07 | 0.07 | 0.06 | 0.07 | 0.06 | 0.06 | 0.06 | 0.06 | — | — | — |
| | Y104D | | | | | | | | | | | | | | | |
| 2-12 | HC- F027G/S053G/ | 0.08 | 0.09 | 0.08 | 0.08 | 0.07 | 0.07 | 0.06 | 0.06 | 0.06 | 0.06 | 0.06 | 0.06 | — | — | — |
| | Y104D/Q111P | | | | | | | | | | | | | | | |
| 2-13 | HC- T030F/Y104D | 1.73 | 1.70 | 1.02 | 1.10 | 0.62 | 0.63 | 0.15 | 0.15 | 0.09 | 0.09 | 0.07 | 0.07 | 11.30 | 11.82 | 8.45 |
| 2-14 | HC- T030F/Y104D/ | 1.56 | 1.47 | 0.98 | 0.90 | 0.49 | 0.51 | 0.10 | 0.10 | 0.07 | 0.07 | 0.06 | 0.07 | 15.61 | 12.84 | 7.34 |
| | Q111P | | | | | | | | | | | | | | | |
| 2-15 | HC- T030F/S053G/ | 0.39 | 0.36 | 0.19 | 0.18 | 0.14 | 0.12 | 0.09 | 0.07 | 0.06 | 0.06 | 0.06 | 0.06 | 4.71 | 2.94 | 2.17 |
| | Y104D | | | | | | | | | | | | | | | |
| 2-16 | HC- T030F/S053G/ | 0.21 | 0.18 | 0.13 | 0.12 | 0.10 | 0.09 | 0.07 | 0.07 | 0.06 | 0.06 | 0.06 | 0.06 | 2.94 | 2.01 | 1.62 |
| | Y104D/Q111P | | | | | | | | | | | | | | | |
| 2-17 | HC- D072L/Y104D | 1.82 | 1.86 | 1.19 | 1.20 | 0.72 | 0.73 | 0.40 | 0.33 | 0.17 | 0.17 | 0.11 | 0.13 | 5.03 | 7.07 | 6.21 |
| 2-18 | HC- D072L/Y104D/ | 1.66 | 1.65 | 1.31 | 1.29 | 0.78 | 0.83 | 0.33 | 0.28 | 0.15 | 0.15 | 0.11 | 0.11 | 5.43 | 8.69 | 7.16 |
| | Q111P | | | | | | | | | | | | | | | |
| 2-19 | HC- S053G/D072L/ | 0.32 | 0.44 | 0.20 | 0.18 | 0.12 | 0.12 | 0.07 | 0.08 | 0.07 | 0.07 | 0.07 | 0.07 | 5.11 | 2.72 | 1.77 |
| | Y104D | | | | | | | | | | | | | | | |
| 2-20 | HC- S053G/D072L/ | 0.14 | 0.14 | 0.10 | 0.10 | 0.08 | 0.08 | 0.07 | 0.07 | 0.06 | 0.06 | 0.06 | 0.06 | 2.11 | 1.72 | 1.42 |
| | Y104D/Q111P | | | | | | | | | | | | | | | |
| | | no dilution | | 1:2 dilution | | 1:4 dilution | | no dilution | | 1:2 dilution | | 1:4 dilution | | | | |
| 2-9 | HC- F027G/Y104D | 0.10 | 0.09 | 0.09 | 0.08 | 0.07 | 0.08 | 0.07 | 0.08 | 0.06 | 0.06 | 0.06 | 0.06 | — | — | — |
| 2-10 | HC- F027G/Y104D/ | 0.10 | 0.11 | 0.09 | 0.09 | 0.08 | 0.08 | 0.08 | 0.08 | 0.07 | 0.07 | 0.06 | 0.06 | — | — | — |
| | Q111P | | | | | | | | | | | | | | | |

### Example 15

### Humanization and Screening of Y104D/Q111P and T030F/Y104D/Q111P Mutants

[1019] Double stranded DNA fragments encoding the full-length light chain and heavy chain CDR sequences of HC-Y104D/Q111P (clone 2-2; also called DP) and HC-T030F/Y104D/Q111P (clone 2-14; also called FDP) were used to generate a library of humanized clones that were then screened for pH-dependent EGFR binding and protein expression levels.

[1020] 1. Screening of Humanized Library

[1021] CHO-S cells were plated in 96-well plates and transfected with the humanized clones. Each plate also contained a positive control (HC-Y104D/Q111P or HC-T030F/Y104D/Q111P) and a negative control (vector only). The supernatants were collected 48 hours post transfection. The IgG concentration was determined as described in Example 1. The supernatants were adjusted to 2 ng/mL and were tested for pH-dependent binding of EGFR binding at pH 6.0 and pH 7.4 using the pH sensitive ELISA described in Example 1. The binding activities at pH 6.0 and pH 7.4 were compared to the binding activity of the positive controls (HC-Y104D/Q111P or HC-T030F/Y104D/Q111P) on the same plate.

[1022] Primary hits were selected, excluding clones with low expression levels, and subjected to a secondary construction and confirmation screening. For screening, transfected supernatant was adjusted to concentrations of 4 ng/mL, 2 ng/mL and 1 ng/mL and were tested for pH-dependent binding of EGFR binding at pH 6.0 and pH 7.4 using the pH sensitive ELISA described in Example 1. The results are set forth in Table 27. The sequences of the identified hits were determined. In the initial screen, some of the hits identified contained a mixture of two sequences, and hence are designated with a “I” (e.g. FDP-h9/FDP-h13). The individual sequences within the mixtures were isolated for subsequent confirmation screenings. All hits contain the parental mutations Y104D and Q111P and/or T30F. Sequence analysis showed that there are 11 unique heavy chains and 16 unique light chains, with each of the hits having a unique combination of humanized light and heavy chain. SEQ ID NO of the variable heavy and light chain of the full-length antibodies are set forth in the Table.

[1023] The screening of identified Hits was repeated using transfected supernatant adjusted to concentrations of 30 ng/mL, 10 ng/mL, 3.3 ng/mL, 1.1 ng/mL, which were tested for pH-dependent binding of EGFR at pH 6.0, pH 6.5 and pH 7.4 using the procedures substantially as described using the pH sensitive ELISA described in Example 1, except that the pH 6.5 condition was added. The results for selected mutants are set forth in Tables 28 and 29. The SEQ ID NO of the variable heavy and light chain of the full-length antibodies are set forth in Table 28.

[1024] In summary, the results show that most selected hits exhibited similar or better ratios of the binding activities at pH 6.0 versus binding activities at pH 7.4 compared to the parental positive controls (HC-Y104D/Q111P or HC-T030F/Y104D/Q111P). In some cases, binding activity was reduced at pH 6.0 compared to the parental positive control, although generally binding activity of selected hits at pH 6.0 was substantially the same or increased compared to the parental positive control. For some hits, binding activity at pH 7.4 also was reduced compared to the parental positive control.

TABLE 27
1^{st} Confirmation Screening of Selected Anti-EGFR Humanized Hits

| | | | | | | | | | pH 6.0/pH 7.4 | | | pH 6.0/pH 7.4 OD ratio Mutant | | |
|---|---|---|---|---|---|---|---|---|---|---|---|---|---|---|
| | SEQ ID | | OD, pH 6.0 | | | OD, pH 7.4 | | | OD ratio | | | p̅H̅ 6̅.̅0̅/̅p̅H̅ 7̅.̅4̅ O̅D̅ r̅a̅t̅i̅o̅ P̅a̅r̅e̅n̅t̅a̅l̅ | | |
| | NO | | 4 | 2 | 1 | 4 | 2 | 1 | 4 | 1 | 1 | 4 | 2 | 1 |
| clone | HC | LC | ng/mL | ng/mL | ng/mL | ng/mL | ng/mL | ng/mL | ng/mL | ng/mL | ng/mL | ng/mL | ng/mL | ng/mL |
| Parental | 1062 | 10 | 1.69 | 1.14 | 0.60 | 0.27 | 0.16 | 0.05 | 6.54 | 7.32 | 11.73 | 1 | 1 | 1 |
| HC- | | | | | | | | | | | | | | |
| Y104D/ | | | | | | | | | | | | | | |
| Q111P | | | | | | | | | | | | | | |
| (2-2; | | | | | | | | | | | | | | |
| DP) | | | | | | | | | | | | | | |
| DP-h1 | 1134 | 1138 | 1.76 | 1.39 | 1.05 | 0.17 | 0.08 | 0.05 | 10.56 | 16.78 | 20.79 | 1.61 | 2.29 | 1.77 |
| DP-h2 | 1134 | 1139 | 0.94 | 0.54 | 0.29 | 0.01 | 0.00 | 0.00 | 68.55 | n/a | n/a | 10.48 | n/a | n/a |
| DP-h3 | 1135 | 1138 | 0.63 | 0.22 | 0.11 | 0.02 | 0.01 | 0.00 | 26.44 | 17.80 | n/a | 4.04 | 2.43 | n/a |
| DP-h4 | 1134 | 1140 | 1.56 | 1.07 | 0.79 | 0.08 | 0.04 | 0.03 | 18.97 | 24.47 | 31.08 | 2.90 | 3.34 | 2.65 |
| DP-h5 | 1134 | 1141 | 2.03 | 1.64 | 1.05 | 1.28 | 0.67 | 0.33 | 1.58 | 2.45 | 3.16 | 0.24 | 0.33 | 0.27 |
| DP-h6 | 1134 | 1142 | 1.92 | 1.31 | 0.85 | 0.20 | 0.09 | 0.04 | 9.37 | 15.28 | 19.86 | 1.43 | 2.09 | 1.69 |
| DP-h7 | 1135 | 1142 | 1.91 | 1.22 | 0.86 | 0.04 | 0.03 | 0.02 | 44.94 | 43.76 | 50.71 | 6.87 | 5.98 | 4.32 |
| DP-h8 | 1134 | 1143 | 1.94 | 1.45 | 0.96 | 0.17 | 0.20 | 0.06 | 11.30 | 7.21 | 17.35 | 1.73 | 0.99 | 1.48 |
| DP-h9 | 1136 | 1142 | 0.92 | 0.36 | 0.17 | 0.03 | 0.02 | 0.02 | 35.63 | 19.53 | 9.82 | 5.45 | 2.67 | 0.84 |
| DP-10 | 1137 | 1144 | 1.34 | 0.84 | 0.59 | 0.13 | 0.21 | 0.08 | 10.41 | 4.08 | 7.05 | 1.59 | 0.56 | 0.60 |
| DP-h12 | 1136 | 1144 | 1.59 | 0.93 | 0.53 | 0.20 | 0.10 | 0.08 | 7.76 | 9.56 | 6.22 | 1.19 | 1.31 | 0.53 |
| DP-h13 | 1137 | 1145 | 1.62 | 1.39 | 0.79 | 0.15 | 0.13 | 0.03 | 10.65 | 10.87 | 24.80 | 1.63 | 1.49 | 2.11 |
| DP-h14 | 1136 | 1145 | 1.19 | 0.79 | 0.41 | 0.18 | 0.13 | 0.04 | 6.64 | 6.01 | 11.31 | 1.02 | 0.82 | 0.96 |
| Parental | 1125 | 10 | 1.27 | 0.98 | 0.46 | 0.06 | 0.05 | 0.03 | 21.04 | 25.93 | 17.19 | 1 | 1 | 1 |
| HC- | | | | | | | | | | | | | | |
| T030F/ | | | | | | | | | | | | | | |
| Y104D/ | | | | | | | | | | | | | | |
| Q111P | | | | | | | | | | | | | | |
| (2-14; | | | | | | | | | | | | | | |
| FDP) | | | | | | | | | | | | | | |
| FDP-h1 | 1146 | 1153 | 1.74 | 1.43 | 0.76 | 0.23 | 0.12 | 0.02 | 7.52 | 11.88 | 47.70 | 0.36 | 0.46 | 2.77 |
| FDP-h2 | 1147 | 1153 | 1.28 | 0.82 | 0.52 | 0.07 | 0.03 | 0.01 | 17.05 | 30.30 | 51.21 | 0.81 | 1.17 | 2.98 |
| FDP-h3 | 1148 | 1154 | 1.79 | 1.47 | 1.01 | 0.03 | 0.00 | 0.00 | 51.37 | n/a | n/a | 2.44 | n/a | n/a |
| FDP-h4 | 1149 | 1154 | 1.83 | 1.37 | 0.82 | 0.09 | 0.04 | 0.00 | 21.33 | 31.20 | n/a | 1.01 | 1.20 | n/a |
| FDP-h5 | 1150 | 1155 | 1.77 | 1.15 | 0.65 | 0.15 | 0.16 | 0.04 | 11.69 | 7.32 | 16.95 | 0.56 | 0.28 | 0.99 |
| FDP-h6 | 1151 | 1156 | 1.18 | 1.01 | 0.66 | 0.15 | 0.07 | 0.00 | 7.73 | 14.86 | n/a | 0.37 | 0.57 | n/a |
| FDP-h7 | 1146 | 1156 | 1.86 | 1.72 | 1.09 | 0.31 | 0.25 | 0.11 | 5.99 | 6.75 | 9.82 | 0.28 | 0.26 | 0.57 |
| FDP-h8 | 1149 | 1156 | 1.63 | 1.30 | 0.58 | 0.11 | 0.05 | 0.04 | 15.38 | 24.86 | 14.58 | 0.73 | 0.96 | 0.85 |
| FDP-h9/ | 1150 | 1157/1186 | 1.19 | 0.75 | 0.63 | 0.03 | 0.00 | 0.00 | 36.19 | n/a | n/a | 0.53 | n/a | n/a |
| FDP-h13* | | | | | | | | | | | | | | |
| FDP-h10/ | 1152 | 1157/1186 | 1.65 | 1.02 | 0.73 | 0.06 | 0.02 | 0.00 | 27.00 | 52.86 | n/a | 1.28 | 2.04 | n/a |
| FDP-h14* | | | | | | | | | | | | | | |
| FDP-h11/ | 1148 | 1157/1186 | 1.85 | 1.36 | 0.83 | 0.06 | 0.03 | 0.01 | 30.61 | 42.13 | 59.49 | 1.45 | 1.63 | 3.46 |
| FDP-h15* | | | | | | | | | | | | | | |
| FDP-h12/ | 1149 | 1157/1186 | 1.79 | 1.25 | 0.83 | 0.06 | 0.03 | 0.02 | 28.79 | 46.07 | 45.12 | 1.37 | 1.78 | 2.62 |
| FDP-h16* | | | | | | | | | | | | | | |
| FDP-h17 | 1150 | 1158 | 1.61 | 1.22 | 0.77 | 0.16 | 0.09 | 0.02 | 9.83 | 14.32 | 31.46 | 0.47 | 0.55 | 1.83 |
| Parental | 1125 | 10 | 1.16 | 0.85 | 0.53 | 0.04 | 0.02 | 0.00 | 31.72 | 37.08 | n/a | 1 | 1 | 1 |
| HC- | | | | | | | | | | | | | | |
| T030F/ | | | | | | | | | | | | | | |
| Y104D/ | | | | | | | | | | | | | | |
| Q111P | | | | | | | | | | | | | | |
| (2-14; | | | | | | | | | | | | | | |
| FDP) | | | | | | | | | | | | | | |
| FDP-h18 | 1152 | 1159 | 1.62 | 1.31 | 0.88 | 0.04 | 0.03 | 0.02 | 45.45 | 51.20 | 57.00 | 1.43 | 1.38 | n/a |
| FDP-h19 | 1146 | 1159 | 1.19 | 0.81 | 0.44 | 0.02 | 0.02 | 0.01 | 51.30 | 46.07 | 33.55 | 1.62 | 1.24 | n/a |
| FDP-h20/ | 1146 | 1157/1186 | 1.43 | 1.08 | 0.73 | 0.01 | 0.00 | 0.00 | 151.47 | n/a | n/a | 4.78 | n/a | n/a |
| FDP-h21* | | | | | | | | | | | | | | |

*contains a mixture of two antibodies

TABLE 28
Further Confirmation Screening of Selected Anti-EGFR Humanized Hits: Optical Density (OD) Values

| | SEQ ID | | OD, pH 6.0 | | | | OD, pH 6.5 | | | | OD, pH 7.4 | | | |
|---|---|---|---|---|---|---|---|---|---|---|---|---|---|---|
| | NO | | 30 | 10 | 3.3 | 1.1 | 30 | 10 | 3.3 | 1.1 | 30 | 10 | 3.3 | 1.1 |
| clone | HC | LC | ng/mL | ng/mL | ng/mL | ng/mL | ng/mL | ng/mL | ng/mL | ng/mL | ng/mL | ng/mL | ng/mL | ng/mL |
| Parental | 1062 | 10 | 1.84 | 1.69 | 1.19 | 0.48 | 0.81 | 0.65 | 0.39 | 0.18 | 0.21 | 0.16 | 0.10 | 0.07 |
| HC-Y104D/ | | | | | | | | | | | | | | |
| Q111P | | | | | | | | | | | | | | |
| (2-2; DP) | | | | | | | | | | | | | | |
| DP-h1 | 1134 | 1138 | 1.82 | 1.42 | 1.19 | 0.74 | 0.96 | 0.67 | 0.35 | 0.18 | 0.35 | 0.22 | 0.11 | 0.06 |
| DP-h2 | 1134 | 1139 | 1.68 | 1.60 | 1.23 | 0.59 | 0.60 | 0.42 | 0.33 | 0.14 | 0.15 | 0.09 | 0.07 | 0.06 |
| DP-h3 | 1135 | 1138 | 1.84 | 1.56 | 1.15 | 0.67 | 0.75 | 0.57 | 0.32 | 0.21 | 0.19 | 0.14 | 0.09 | 0.07 |
| DP-h4 | 1134 | 1140 | 1.66 | 1.55 | 1.10 | 0.60 | 0.49 | 0.51 | 0.21 | 0.08 | 0.12 | 0.07 | 0.05 | 0.05 |
| Parental | 1062 | 10 | 1.86 | 1.67 | 1.19 | 0.58 | 1.31 | 1.05 | 0.66 | 0.29 | 0.56 | 0.32 | 0.14 | 0.08 |
| HC-Y104D/ | | | | | | | | | | | | | | |
| Q111P | | | | | | | | | | | | | | |
| (2-2; DP) | | | | | | | | | | | | | | |
| DP-h5 | 1134 | 1141 | 1.91 | 1.73 | 1.35 | 0.71 | 1.21 | 0.92 | 0.53 | 0.26 | 0.42 | 0.25 | 0.11 | 0.08 |
| DP-h6 | 1134 | 1142 | 1.85 | 1.75 | 1.34 | 0.74 | 1.46 | 1.37 | 0.94 | 0.49 | 0.96 | 0.76 | 0.43 | 0.21 |
| DP-h7 | 1135 | 1142 | 1.93 | 1.60 | 1.06 | 0.49 | 1.06 | 0.80 | 0.43 | 0.19 | 0.29 | 0.19 | 0.11 | 0.07 |
| DP-h8 | 1134 | 1143 | 1.58 | 1.38 | 0.78 | 0.33 | 0.62 | 0.40 | 0.18 | 0.09 | 0.11 | 0.07 | 0.05 | 0.05 |
| Parental | 1062 | 10 | 1.85 | 1.78 | 1.18 | 0.58 | 1.25 | 1.10 | 0.63 | 0.28 | 0.54 | 0.32 | 0.15 | 0.07 |
| HC-Y104D/ | | | | | | | | | | | | | | |
| Q111P | | | | | | | | | | | | | | |
| (2-2; DP) | | | | | | | | | | | | | | |
| DP-h9 | 1136 | 1142 | 1.18 | 0.75 | 0.34 | 0.16 | 0.31 | 0.17 | 0.10 | 0.07 | 0.10 | 0.08 | 0.07 | 0.07 |
| DP-h10 | 1137 | 1144 | 1.52 | 1.19 | 0.63 | 0.26 | 0.96 | 0.72 | 0.36 | 0.14 | 0.49 | 0.29 | 0.12 | 0.07 |
| DP-h12 | 1136 | 1144 | 1.74 | 1.40 | 0.93 | 0.40 | 1.06 | 0.80 | 0.43 | 0.17 | 0.37 | 0.22 | 0.13 | 0.08 |
| DP-h13 | 1137 | 1145 | 1.20 | 0.92 | 0.50 | 0.21 | 0.77 | 0.51 | 0.26 | 0.12 | 0.39 | 0.22 | 0.11 | 0.06 |
| Parental | 1062 | 10 | 1.72 | 1.58 | 1.11 | 0.54 | 0.95 | 0.91 | 0.53 | 0.22 | 0.42 | 0.27 | 0.12 | 0.06 |
| HC-Y104D/ | | | | | | | | | | | | | | |
| Q111P | | | | | | | | | | | | | | |
| (2-2; DP) | | | | | | | | | | | | | | |
| DP-h14 | 1136 | 1145 | 1.44 | 1.20 | 0.74 | 0.36 | 0.77 | 0.53 | 0.28 | 0.13 | 0.24 | 0.13 | 0.09 | 0.08 |
| Parental HC- | 1125 | 10 | 1.86 | 1.72 | 1.07 | 0.51 | 1.09 | 1.05 | 0.52 | 0.25 | 0.52 | 0.29 | 0.14 | 0.08 |
| T030F/Y104D/ | | | | | | | | | | | | | | |
| Q111P | | | | | | | | | | | | | | |
| (2-14; FDP) | | | | | | | | | | | | | | |
| FDP-h1 | 1146 | 1153 | 2.09 | 1.78 | 1.23 | 0.66 | 1.23 | 0.91 | 0.42 | 0.18 | 0.44 | 0.22 | 0.11 | 0.08 |
| FDP-h2 | 1147 | 1153 | 1.64 | 1.40 | 0.90 | 0.41 | 0.82 | 0.59 | 0.31 | 0.12 | 0.17 | 0.10 | 0.09 | 0.06 |
| FDP-h3 | 1148 | 1154 | 2.14 | 1.87 | 1.13 | 0.61 | 1.26 | 0.92 | 0.40 | 0.18 | 0.30 | 0.15 | 0.10 | 0.07 |
| FDP-h4 | 1149 | 1154 | 1.67 | 1.50 | 1.01 | 0.50 | 0.93 | 0.72 | 0.42 | 0.18 | 0.27 | 0.15 | 0.07 | 0.06 |
| Parental HC- | 1125 | 10 | 1.84 | 1.81 | 1.29 | 0.57 | 1.28 | 1.19 | 0.76 | 0.36 | 0.60 | 0.32 | 0.19 | 0.11 |
| T030F/Y104D/ | | | | | | | | | | | | | | |
| Q111P | | | | | | | | | | | | | | |
| (2-14; FDP) | | | | | | | | | | | | | | |
| FDP-h5 | 1150 | 1155 | 2.16 | 2.00 | 1.42 | 0.65 | 1.40 | 1.03 | 0.76 | 0.39 | 0.70 | 0.56 | 0.29 | 0.16 |
| FDP-h6 | 1151 | 1156 | 2.02 | 1.63 | 1.03 | 0.51 | 1.46 | 0.96 | 0.53 | 0.22 | 0.56 | 0.30 | 0.16 | 0.08 |
| FDP-h7 | 1146 | 1156 | 2.25 | 2.05 | 1.67 | 1.00 | 1.47 | 1.60 | 1.23 | 0.68 | 1.11 | 0.86 | 0.52 | 0.27 |
| FDP-h8 | 1149 | 1156 | 1.83 | 1.42 | 0.97 | 0.47 | 1.34 | 1.00 | 0.63 | 0.30 | 0.60 | 0.31 | 0.18 | 0.09 |
| Parental HC- | 1125 | 10 | 1.83 | 1.61 | 1.01 | 0.47 | 1.33 | 1.14 | 0.71 | 0.33 | 0.46 | 0.35 | 0.18 | 0.10 |
| T030F/Y104D/ | | | | | | | | | | | | | | |
| Q111P | | | | | | | | | | | | | | |
| (2-14; FDP) | | | | | | | | | | | | | | |
| FDP-h9 | 1150 | 1157 | 2.16 | 1.68 | 1.02 | 0.43 | 1.03 | 0.61 | 0.23 | 0.11 | 0.21 | 0.14 | 0.09 | 0.08 |
| FDP-h10 | 1152 | 1157 | 2.00 | 1.79 | 1.20 | 0.58 | 1.08 | 0.83 | 0.44 | 0.22 | 0.46 | 0.17 | 0.10 | 0.08 |
| FDP-h11 | 1148 | 1157 | 2.15 | 1.78 | 1.09 | 0.55 | 1.46 | 0.88 | 0.40 | 0.19 | 0.34 | 0.22 | 0.13 | 0.09 |
| FDP-h12 | 1149 | 1157 | 1.60 | 1.47 | 1.01 | 0.53 | 0.71 | 0.58 | 0.29 | 0.13 | 0.34 | 0.12 | 0.08 | 0.07 |
| Parental HC- | 1125 | 10 | 1.90 | 1.60 | 1.03 | 0.49 | 1.31 | 0.93 | 0.53 | 0.26 | 0.40 | 0.24 | 0.13 | 0.09 |
| T030F/Y104D/ | | | | | | | | | | | | | | |
| Q111P | | | | | | | | | | | | | | |
| (2-14; FDP) | | | | | | | | | | | | | | |
| FDP-h13 | 1150 | 1186 | 2.21 | 1.81 | 1.22 | 0.62 | 1.40 | 0.79 | 0.42 | 0.19 | 0.31 | 0.12 | 0.08 | 0.07 |
| FDP-h14 | 1152 | 1186 | 1.99 | 1.86 | 1.36 | 0.67 | 1.20 | 0.93 | 0.55 | 0.23 | 0.35 | 0.23 | 0.11 | 0.07 |
| FDP-h15 | 1148 | 1186 | 2.24 | 1.94 | 1.46 | 0.75 | 1.63 | 1.16 | 0.71 | 0.33 | 0.57 | 0.21 | 0.13 | 0.08 |
| FDP-h16 | 1149 | 1186 | 1.78 | 1.65 | 1.31 | 0.75 | 1.01 | 0.80 | 0.47 | 0.21 | 0.23 | 0.16 | 0.08 | 0.06 |
| Parental HC- | 1125 | 10 | 1.69 | 1.31 | 0.92 | 0.57 | 1.17 | 0.76 | 0.57 | 0.32 | 0.26 | 0.31 | 0.16 | 0.11 |
| T030F/Y104D/ | | | | | | | | | | | | | | |
| Q111P | | | | | | | | | | | | | | |
| (2-14; FDP) | | | | | | | | | | | | | | |
| FDP-h17 | 1150 | 1158 | 2.25 | 1.84 | 1.19 | 0.53 | 1.16 | 0.75 | 0.47 | 0.28 | 0.51 | 0.25 | 0.18 | 0.14 |
| Parental HC- | 1125 | 10 | 1.130 | 1.060 | 0.812 | 0.410 | 0.589 | 0.469 | 0.320 | 0.179 | 0.173 | 0.127 | 0.091 | 0.072 |
| T030F/Y104D/ | | | | | | | | | | | | | | |
| Q111P | | | | | | | | | | | | | | |
| (2-14; FDP) | | | | | | | | | | | | | | |
| FDP-h18 | 1152 | 1159 | 1.299 | 1.157 | 0.875 | 0.469 | 0.669 | 0.510 | 0.304 | 0.153 | 0.129 | 0.109 | 0.083 | 0.069 |
| FDP-h19 | 1146 | 1159 | 1.017 | 0.868 | 0.598 | 0.323 | 0.397 | 0.268 | 0.136 | 0.084 | 0.083 | 0.065 | 0.053 | 0.050 |
| Parental HC- | 1125 | 10 | 1.368 | 1.233 | 0.850 | 0.430 | 0.789 | 0.720 | 0.467 | 0.236 | 0.300 | 0.197 | 0.124 | 0.087 |
| T030F/Y104D/ | | | | | | | | | | | | | | |
| Q111P | | | | | | | | | | | | | | |
| (2-14; FDP) | | | | | | | | | | | | | | |
| FDP-h20 | 1146 | 1157 | 1.571 | 1.490 | 1.174 | 0.606 | 0.591 | 0.467 | 0.311 | 0.160 | 0.196 | 0.143 | 0.085 | 0.067 |
| FDP-h21 | 1146 | 1186 | 1.495 | 1.288 | 0.922 | 0.531 | 0.763 | 0.588 | 0.343 | 0.186 | 0.219 | 0.131 | 0.085 | 0.058 |

TABLE 29
Further Confirmation Screening of Selected Anti-EGFR Humanized Hits: pH Ratios

| | pH 6.0/pH 7.4 | | | | pH 6.0/pH 7.4 OD ratio Mutant | | | |
|---|---|---|---|---|---|---|---|---|
| | OD ratio | | | | p̅H̅ 6̅.̅0̅/̅p̅H̅ 7̅.̅4̅ O̅D̅ r̅a̅t̅i̅o̅ P̅a̅r̅e̅n̅t̅a̅l̅ | | | |
| | 30 | 10 | 3.3 | 1.1 | 30 | 10 | 3.3 | 1.1 |
| clone | ng/mL | ng/mL | ng/mL | ng/mL | ng/mL | ng/mL | ng/mL | ng/mL |
| Parental | 5.33 | 7.72 | 10.52 | 7.57 | 1 | 1 | 1 | 1 |
| HC-Y104D/Q111P | | | | | | | | |
| (2-2; DP) | | | | | | | | |
| DP-h1 | 8.64 | 8.76 | 11.98 | 10.69 | 1.62 | 1.13 | 1.14 | 1.41 |
| DP-h2 | 11.48 | 18.48 | 18.81 | 10.65 | 2.12 | 2.40 | 1.79 | 1.41 |
| DP-h3 | 9.86 | 11.50 | 12.23 | 9.37 | 1.85 | 1.49 | 1.16 | 1.24 |
| DP-h4 | 13.39 | 22.97 | 20.19 | 11.93 | 2.51 | 2.97 | 1.92 | 1.58 |
| Parental | 3.30 | 5.18 | 8.21 | 7.21 | 1 | 1 | 1 | 1 |
| HC-Y104D/Q111P | | | | | | | | |
| (2-2; DP) | | | | | | | | |
| DP-h5 | 4.51 | 7.00 | 12.25 | 8.70 | 1.36 | 1.35 | 1.49 | 1.21 |
| DP-h6 | 1.93 | 2.31 | 3.12 | 3.54 | 0.58 | 0.44 | 0.38 | 0.49 |
| DP-h7 | 6.68 | 8.60 | 9.30 | 6.64 | 2.02 | 1.66 | 1.13 | 0.92 |
| DP-h8 | 14.88 | 21.13 | 15.12 | 6.81 | 4.51 | 4.08 | 1.84 | 0.95 |
| Parental | 3.40 | 5.51 | 7.73 | 7.94 | 1 | 1 | 1 | 1 |
| HC-Y104D/Q111P | | | | | | | | |
| (2-2; DP) | | | | | | | | |
| DP-h9 | 12.30 | 9.88 | 4.68 | 2.39 | 3.61 | 1.79 | 0.61 | 0.30 |
| DP-h10 | 3.10 | 4.13 | 5.19 | 3.92 | 0.91 | 0.75 | 0.67 | 0.49 |
| DP-h12 | 4.74 | 6.43 | 7.47 | 4.96 | 1.39 | 1.17 | 0.97 | 0.63 |
| DP-h13 | 3.10 | 4.10 | 4.34 | 3.55 | 0.91 | 0.74 | 0.56 | 0.45 |
| Parental | 4.06 | 5.94 | 9.40 | 8.58 | 1 | 1 | 1 | 1 |
| HC-Y104D/Q111P | | | | | | | | |
| (2-2; DP) | | | | | | | | |
| DP-h14 | 5.95 | 8.94 | 8.42 | 4.71 | 1.47 | 1.51 | 0.90 | 0.55 |
| Parental HC- | 3.55 | 5.98 | 7.86 | 6.24 | 1 | 1 | 1 | 1 |
| T030F/Y104D/Q111P | | | | | | | | |
| (2-14; FDP) | | | | | | | | |
| FDP-h1 | 4.79 | 8.07 | 11.59 | 8.49 | 1.35 | 1.35 | 1.48 | 1.36 |
| FDP-h2 | 9.45 | 14.16 | 9.55 | 6.61 | 2.66 | 2.37 | 1.21 | 1.06 |
| FDP-h3 | 7.18 | 12.11 | 11.33 | 8.26 | 2.02 | 2.02 | 1.44 | 1.32 |
| FDP-h4 | 6.11 | 10.30 | 13.62 | 8.38 | 1.72 | 1.72 | 1.73 | 1.34 |
| Parental HC- | 3.10 | 5.56 | 6.95 | 5.33 | 1 | 1 | 1 | 1 |
| T030F/Y104D/Q111P | | | | | | | | |
| (2-14; FDP) | | | | | | | | |
| FDP-h5 | 3.09 | 3.60 | 4.93 | 4.08 | 1.00 | 0.65 | 0.71 | 0.77 |
| FDP-h6 | 3.59 | 5.52 | 6.32 | 6.49 | 1.16 | 0.99 | 0.91 | 1.22 |
| FDP-h7 | 2.03 | 2.38 | 3.23 | 3.75 | 0.66 | 0.43 | 0.47 | 0.70 |
| FDP-h8 | 3.06 | 4.53 | 5.24 | 5.32 | 0.99 | 0.81 | 0.75 | 1.00 |
| Parental HC- | 3.97 | 4.54 | 5.67 | 4.95 | 1 | 1 | 1 | 1 |
| T030F/Y104D/Q111P | | | | | | | | |
| (2-14; FDP) | | | | | | | | |
| FDP-h9 | 10.06 | 12.05 | 11.30 | 5.49 | 2.53 | 2.66 | 1.99 | 1.11 |
| FDP-h10 | 4.38 | 10.27 | 11.72 | 7.50 | 1.10 | 2.26 | 2.06 | 1.51 |
| FDP-h11 | 6.28 | 8.18 | 8.20 | 6.26 | 1.58 | 1.80 | 1.44 | 1.26 |
| FDP-h12 | 4.71 | 12.15 | 12.67 | 7.71 | 1.19 | 2.68 | 2.23 | 1.56 |
| Parental HC- | 4.77 | 6.58 | 7.92 | 5.71 | 1 | 1 | 1 | 1 |
| T030F/Y104D/Q111P | | | | | | | | |
| (2-14; FDP) | | | | | | | | |
| FDP-h13 | 7.12 | 15.35 | 14.91 | 8.28 | 1.49 | 2.33 | 1.88 | 1.45 |
| FDP-h14 | 5.62 | 8.14 | 12.66 | 9.25 | 1.18 | 1.24 | 1.60 | 1.62 |
| FDP-h15 | 3.93 | 9.23 | 11.45 | 9.86 | 0.82 | 1.40 | 1.45 | 1.73 |
| FDP-h16 | 7.63 | 10.18 | 15.52 | 11.90 | 1.60 | 1.55 | 1.96 | 2.08 |
| Parental HC- | 6.44 | 4.29 | 5.88 | 5.00 | 1 | 1 | 1 | 1 |
| T030F/Y104D/Q111P | | | | | | | | |
| (2-14; FDP) | | | | | | | | |
| FDP-h17 | 4.43 | 7.23 | 6.46 | 3.91 | 0.69 | 1.69 | 1.10 | 0.78 |
| Parental HC- | 6.55 | 8.37 | 8.97 | 5.73 | 1 | 1 | 1 | 1 |
| T030F/Y104D/Q111P | | | | | | | | |
| (2-14; FDP) | | | | | | | | |
| FDP-h18 | 10.11 | 10.64 | 10.54 | 6.79 | 1.54 | 1.27 | 1.17 | 1.18 |
| FDP-h19 | 12.24 | 13.41 | 11.35 | 6.40 | 1.87 | 1.60 | 1.26 | 1.12 |
| Parental HC- | 4.57 | 6.25 | 6.86 | 4.94 | 1 | 1 | 1 | 1 |
| T030F/Y104D/Q111P | | | | | | | | |
| (2-14; FDP) | | | | | | | | |
| FDP-h20 | 8.03 | 10.41 | 13.84 | 9.11 | 1.76 | 1.66 | 2.02 | 1.84 |
| FDP-h21 | 6.84 | 9.87 | 10.89 | 9.23 | 1.50 | 1.58 | 1.59 | 1.87 |
| | pH 6.5/pH 7.4 | | | | pH 6.5/pH 7.4 OD ratio Mutant | | | |
| | OD ratio | | | | p̅H̅ 6̅.̅5̅/̅p̅H̅ 7̅.̅4̅ O̅D̅ r̅a̅t̅i̅o̅ P̅a̅r̅e̅n̅t̅a̅l̅ | | | |
| | 30 | 10 | 5.3 | 1.1 | 30 | 10 | 3.3 | 1.1 |
| clone | ng/mL | ng/mL | ng/mL | ng/mL | ng/mL | ng/mL | ng/mL | ng/mL |
| Parental | 2.33 | 2.99 | 3.46 | 2.91 | 1 | 1 | 1 | 1 |
| HC-Y104D/Q111P | | | | | | | | |
| (2-2; DP) | | | | | | | | |
| DP-h1 | 4.56 | 4.13 | 3.47 | 2.54 | 1.96 | 1.38 | 1.00 | 0.87 |
| DP-h2 | 4.11 | 4.89 | 5.12 | 2.51 | 1.77 | 1.64 | 1.48 | 0.86 |
| DP-h3 | 3.99 | 4.19 | 3.41 | 2.87 | 1.71 | 1.40 | 0.98 | 0.99 |
| DP-h4 | 3.94 | 7.52 | 3.95 | 1.51 | 1.69 | 2.51 | 1.14 | 0.52 |
| Parental | 2.33 | 3.26 | 4.55 | 3.61 | 1 | 1 | 1 | 1 |
| HC-Y104D/Q111P | | | | | | | | |
| (2-2; DP) | | | | | | | | |
| DP-h5 | 2.85 | 3.71 | 4.83 | 3.15 | 1.22 | 1.14 | 1.06 | 0.87 |
| DP-h6 | 1.52 | 1.80 | 2.19 | 2.34 | 0.65 | 0.55 | 0.48 | 0.65 |
| DP-h7 | 3.68 | 4.30 | 3.81 | 2.64 | 1.58 | 1.32 | 0.84 | 0.73 |
| DP-h8 | 5.84 | 6.04 | 3.49 | 1.86 | 2.51 | 1.85 | 0.77 | 0.52 |
| Parental | 2.30 | 3.40 | 4.09 | 3.74 | 1 | 1 | 1 | 1 |
| HC-Y104D/Q111P | | | | | | | | |
| (2-2; DP) | | | | | | | | |
| DP-h9 | 3.27 | 2.30 | 1.37 | 1.07 | 1.42 | 0.68 | 0.33 | 0.29 |
| DP-h10 | 1.95 | 2.50 | 2.94 | 2.20 | 0.85 | 0.74 | 0.72 | 0.59 |
| DP-h12 | 2.87 | 3.70 | 3.47 | 2.10 | 1.25 | 1.09 | 0.85 | 0.56 |
| DP-h13 | 1.99 | 2.28 | 2.31 | 2.08 | 0.87 | 0.67 | 0.57 | 0.56 |
| Parental | 2.24 | 3.44 | 4.46 | 3.53 | 1 | 1 | 1 | 1 |
| HC-Y104D/Q111P | | | | | | | | |
| (2-2; DP) | | | | | | | | |
| DP-h14 | 3.19 | 3.94 | 3.15 | 1.69 | 1.42 | 1.15 | 0.71 | 0.48 |
| Parental HC- | 2.08 | 3.65 | 3.87 | 3.00 | 1 | 1 | 1 | 1 |
| T030F/Y104D/Q111P | | | | | | | | |
| (2-14; FDP) | | | | | | | | |
| FDP-h1 | 2.82 | 4.11 | 3.93 | 2.31 | 1.35 | 1.13 | 1.02 | 0.77 |
| FDP-h2 | 4.73 | 5.99 | 3.25 | 1.98 | 2.27 | 1.64 | 0.84 | 0.66 |
| FDP-h3 | 4.25 | 5.97 | 4.04 | 2.50 | 2.04 | 1.63 | 1.04 | 0.83 |
| FDP-h4 | 3.40 | 4.96 | 5.64 | 2.95 | 1.63 | 1.36 | 1.46 | 0.98 |
| Parental HC- | 2.15 | 3.67 | 4.10 | 3.37 | 1 | 1 | 1 | 1 |
| T030F/Y104D/Q111P | | | | | | | | |
| (2-14; FDP) | | | | | | | | |
| FDP-h5 | 2.01 | 1.85 | 2.65 | 2.44 | 0.93 | 0.50 | 0.65 | 0.72 |
| FDP-h6 | 2.60 | 3.26 | 3.23 | 2.79 | 1.201 | 0.89 | 0.79 | 0.83 |
| FDP-h7 | 1.32 | 1.86 | 2.39 | 2.55 | 0.62 | 0.51 | 0.58 | 0.76 |
| FDP-h8 | 2.25 | 3.19 | 3.39 | 3.36 | 1.05 | 0.87 | 0.83 | 1.00 |
| Parental HC- | 2.90 | 3.23 | 3.97 | 3.43 | 1 | 1 | 1 | 1 |
| T030F/Y104D/Q111P | | | | | | | | |
| (2-14; FDP) | | | | | | | | |
| FDP-h9 | 4.82 | 4.34 | 2.50 | 1.41 | 1.66 | 1.35 | 0.63 | 0.41 |
| FDP-h10 | 2.37 | 4.76 | 4.35 | 2.86 | 0.82 | 1.47 | 1.10 | 0.83 |
| FDP-h11 | 4.26 | 4.06 | 3.02 | 2.17 | 1.47 | 1.26 | 0.76 | 0.63 |
| FDP-h12 | 2.09 | 4.77 | 3.59 | 1.87 | 0.72 | 1.48 | 0.91 | 0.55 |
| Parental HC- | 3.30 | 3.81 | 4.09 | 3.09 | 1 | 1 | 1 | 1 |
| T030F/Y104D/Q111P | | | | | | | | |
| (2-14; FDP) | | | | | | | | |
| FDP-h13 | 4.52 | 6.74 | 5.13 | 2.53 | 1.37 | 1.77 | 1.25 | 0.82 |
| FDP-h14 | 3.38 | 4.08 | 5.07 | 3.16 | 1.02 | 1.07 | 1.24 | 1.02 |
| FDP-h15 | 2.85 | 5.51 | 5.57 | 4.39 | 0.86 | 1.44 | 1.36 | 1.42 |
| FDP-h16 | 4.32 | 4.91 | 5.63 | 3.35 | 1.31 | 1.29 | 1.38 | 1.09 |
| Parental HC- | 4.49 | 2.47 | 3.69 | 2.83 | 1 | 1 | 1 | 1 |
| T030F/Y104D/Q111P | | | | | | | | |
| (2-14; FDP) | | | | | | | | |
| FDP-h17 | 2.28 | 2.96 | 2.52 | 2.07 | 0.51 | 1.20 | 0.69 | 0.73 |
| Parental HC- | 3.41 | 3.70 | 3.53 | 2.50 | 1 | 1 | 1 | 1 |
| T030F/Y104D/Q111P | | | | | | | | |
| (2-14; FDP) | | | | | | | | |
| FDP-h18 | 5.21 | 4.69 | 3.67 | 2.22 | 1.53 | 1.27 | 1.04 | 0.89 |
| FDP-h19 | 4.77 | 4.15 | 2.58 | 1.66 | 1.40 | 1.12 | 0.73 | 0.66 |
| Parental HC- | 2.63 | 3.65 | 3.77 | 2.71 | 1 | 1 | 1 | 1 |
| T030F/Y104D/Q111P | | | | | | | | |
| (2-14; FDP) | | | | | | | | |
| FDP-h20 | 3.02 | 3.26 | 3.67 | 2.40 | 1.15 | 0.89 | 0.97 | 0.89 |
| FDP-h21 | 3.49 | 4.51 | 4.05 | 3.24 | 1.32 | 1.23 | 1.07 | 1.19 |

[1025] 2. Expression of Selected Humanized Antibodies in CHO-S Cells

[1026] The expression of the humanized antibody hits above also were screened for levels of expression. CHO-S cells were plated in 96-well plates and transfected with the selected humanized clones set forth in Tables 28 and 29 above using the methods described in Example 1. The IgG concentration was determined as described in Example 1. The results are set forth in Table 30. The results show that the yields of the humanized clones are substantially increased compared to the parental clones.

TABLE 30
Expression of Selected Hits

| | Quantitation 1 | Quantitation 2 | Quantitation 3 |
|---|---|---|---|
| Clone | (ng/mL) | (ng/mL) | (ng/mL) |
| cetuximab | 257.29 | 251.67 | 254.48 |
| Y104D/Q111P; FP | 253.43 | 228.45 | 240.94 |
| T30F/Y104D/Q111P; | 82.71 | 79.91 | 81.31 |
| DFP | | | |
| DP-h1 | 2631.42 | 2482.36 | 2556.89 |
| DP-h2 | 2335.73 | 2251.82 | 2293.77 |
| DP-h3 | 2069.61 | 1997.00 | 2033.30 |
| DP-h4 | 2496.69 | 2552.73 | 2524.71 |
| DP-h5 | 1924.45 | 1889.72 | 1907.09 |
| DP-h6 | 1721.98 | 1573.85 | 1647.92 |
| DP-h7 | 931.96 | 791.67 | 861.82 |
| DP-h8 | 1497.07 | 1198.49 | 1347.78 |
| DP-h9 | 1672.25 | 1763.52 | 1717.88 |
| DP-h10 | 2325.02 | 2412.02 | 2368.52 |
| DP-h12 | 2304.56 | 2288.86 | 2296.71 |
| DP-h13 | 2796.34 | 2702.32 | 2749.33 |
| DP-h14 | 2443.26 | 2182.60 | 2312.93 |
| FDP-h1 | 3621.47 | 3431.47 | 3526.47 |
| FDP-h2 | 2914.16 | 2778.90 | 2846.53 |
| FDP-h3 | 1163.38 | 1131.05 | 1147.21 |
| FDP-h4 | 1055.94 | 1048.72 | 1052.33 |
| FDP-h5 | 2671.64 | 2523.70 | 2597.67 |
| FDP-h6 | 2650.07 | 2482.81 | 2566.44 |
| FDP-h7 | 1983.05 | 1825.43 | 1904.24 |
| FDP-h8 | 2373.23 | 2181.37 | 2277.30 |
| FDP-h9 | 3235.35 | 3211.05 | 3223.20 |
| FDP-h10 | 2656.16 | 2618.89 | 2637.52 |
| FDP-h11 | 2109.93 | 2095.10 | 2102.51 |
| FDP-h12 | 1792.14 | 1715.23 | 1753.69 |
| FDP-h13 | 2745.20 | 2686.71 | 2715.96 |
| FDP-h14 | 2253.08 | 2133.30 | 2193.19 |
| FDP-h15 | 1859.46 | 1676.10 | 1767.78 |
| FDP-h16 | 1825.07 | 1572.16 | 1698.61 |
| FDP-h17 | 1979.96 | 2033.30 | 2006.63 |

[1027] Since modifications will be apparent to those of skill in this art, it is intended that this invention be limited only by the scope of the appended claims.

The application's sequence listing, which the Patent Office published only in electronic form, follows.

SEQUENCE LISTING (1207 sequences)

SEQ ID NO: 1 - protein, 449 aa, Artificial Sequence
  Cetuximab Heavy Chain
QVQLKQSGPGLVQPSQSLSITCTVSGFSLTNYGVHWVRQSPGKGLEWLGVIWSGGNTDYNTPFTSRLSINKDNSKSQVFFKMNSLQSNDTAIYYCARALTYYDYEFAYWGQGTLVTVSAASTKGPSVFPLAPSSKSTSGGTAALGCLVKDYFPEPVTVSWNSGALTSGVHTFPAVLQSSGLYSLSSVVTVPSSSLGTQTYICNVNHKPSNTKVDKRVEPKSCDKTHTCPPCPAPELLGGPSVFLFPPKPKDTLMISRTPEVTCVVVDVSHEDPEVKFNWYVDGVEVHNAKTKPREEQYNSTYRVVSVLTVLHQDWLNGKEYKCKVSNKALPAPIEKTISKAKGQPREPQVYTLPPSRDELTKNQVSLTCLVKGFYPSDIAVEWESNGQPENNYKTTPPVLDSDGSFFLYSKLTVDKSRWQQGNVFSCSVMHEALHNHYTQKSLSLSPGK

SEQ ID NO: 2 - protein, 213 aa, Artificial Sequence
  Cetuximab Light Chain
DILLTQSPVILSVSPGERVSFSCRASQSIGTNIHWYQQRTNGSPRLLIKYASESISGIPSRFSGSGSGTDFTLSINSVESEDIADYYCQQNNNWPTTFGAGTKLELKRTVAAPSVFIFPPSDEQLKSGTASVVCLLNNFYPREAKVQWKVDNALQSGNSQESVTEQDSKDSTYSLSSTLTLSKADYEKHKVYACEVTHQGLSSPVTKSFNRGA

SEQ ID NO: 3 - protein, 119 aa, Artificial Sequence
  Cetuximab Heavy Chain Variable Domain
QVQLKQSGPGLVQPSQSLSITCTVSGFSLTNYGVHWVRQSPGKGLEWLGVIWSGGNTDYNTPFTSRLSINKDNSKSQVFFKMNSLQSNDTAIYYCARALTYYDYEFAYWGQGTLVTVSA

SEQ ID NO: 4 - protein, 107 aa, Artificial Sequence
  Cetuximab Light Chain Variable Domain
DILLTQSPVILSVSPGERVSFSCRASQSIGTNIHWYQQRTNGSPRLLIKYASESISGIPSRFSGSGSGTDFTLSINSVESEDIADYYCQQNNNWPTTFGAGTKLELK

SEQ ID NO: 5 - protein, 222 aa, Artificial Sequence
  Cetuximab Heavy Chain Fab
QVQLKQSGPGLVQPSQSLSITCTVSGFSLTNYGVHWVRQSPGKGLEWLGVIWSGGNTDYNTPFTSRLSINKDNSKSQVFFKMNSLQSNDTAIYYCARALTYYDYEFAYWGQGTLVTVSAASTKGPSVFPLAPSSKSTSGGTAALGCLVKDYFPEPVTVSWNSGALTSGVHTFPAVLQSSGLYSLSSVVTVPSSSLGTQTYICNVNHKPSNTKVDKRVEPKSC

SEQ ID NO: 6 - protein, 1210 aa, Homo sapiens [sequence omitted]

SEQ ID NO: 7 - protein, 457 aa, Artificial Sequence
  Reference Cetuximab Heavy Chain with Flag Tag
QVQLKQSGPGLVQPSQSLSITCTVSGFSLTNYGVHWVRQSPGKGLEWLGVIWSGGNTDYNTPFTSRLSINKDNSKSQVFFKMNSLQSNDTAIYYCARALTYYDYEFAYWGQGTLVTVSSASTKGPSVFPLAPSSKSTSGGTAALGCLVKDYFPEPVTVSWNSGALTSGVHTFPAVLQSSGLYSLSSVVTVPSSSLGTQTYICNVNHKPSNTKVDKKVEPKSCDKTHTCPPCPAPELLGGPSVFLFPPKPKDTLMISRTPEVTCVVVDVSHEDPEVKFNWYVDGVEVHNAKTKPREEQYNSTYRVVSVLTVLHQDWLNGKEYKCKVSNKALPAPIEKTISKAKGQPREPQVYTLPPSRDELTKNQVSLTCLVKGFYPSDIAVEWESNGQPENNYKTTPPVLDSDGSFFLYSKLTVDKSRWQQGNVFSCSVMHEALHNHYTQKSLSLSPGKDYKDDDDK

SEQ ID NO: 8 - protein, 449 aa, Artificial Sequence
  Reference Cetuximab Heavy Chain
QVQLKQSGPGLVQPSQSLSITCTVSGFSLTNYGVHWVRQSPGKGLEWLGVIWSGGNTDYNTPFTSRLSINKDNSKSQVFFKMNSLQSNDTAIYYCARALTYYDYEFAYWGQGTLVTVSSASTKGPSVFPLAPSSKSTSGGTAALGCLVKDYFPEPVTVSWNSGALTSGVHTFPAVLQSSGLYSLSSVVTVPSSSLGTQTYICNVNHKPSNTKVDKKVEPKSCDKTHTCPPCPAPELLGGPSVFLFPPKPKDTLMISRTPEVTCVVVDVSHEDPEVKFNWYVDGVEVHNAKTKPREEQYNSTYRVVSVLTVLHQDWLNGKEYKCKVSNKALPAPIEKTISKAKGQPREPQVYTLPPSRDELTKNQVSLTCLVKGFYPSDIAVEWESNGQPENNYKTTPPVLDSDGSFFLYSKLTVDKSRWQQGNVFSCSVMHEALHNHYTQKSLSLSPGK

SEQ ID NO: 9 - protein, 213 aa, Artificial Sequence
  Reference Cetuximab Light Chain
DILLTQSPVILSVSPGERVSFSCRASQSIGTNIHWYQQRTNGSPRLLIKYASESISGIPSRFSGSGSGTDFTLSINSVESEDIADYYCQQNNNWPTTFGQGTKLELKRTVAAPSVFIFPPSDEQLKSGTASVVCLLNNFYPREAKVQWKVDNALQSGNSQESVTEQDSKDSTYSLSSTLTLSKADYEKHKVYACEVTHQGLSSPVTKSFNRGA

SEQ ID NO: 10 - protein, 107 aa, Artificial Sequence
  Reference Cetuximab Light Chain Variable Domain
DILLTQSPVILSVSPGERVSFSCRASQSIGTNIHWYQQRTNGSPRLLIKYASESISGIPSRFSGSGSGTDFTLSINSVESEDIADYYCQQNNNWPTTFGQGTKLELK

SEQ ID NO: 11 - protein, 103 aa, Homo sapiens
  Cetuixmab CH1
ASTKGPSVFPLAPSSKSTSGGTAALGCLVKDYFPEPVTVSWNSGALTSGVHTFPAVLQSSGLYSLSSVVTVPSSSLGTQTYICNVNHKPSNTKVDKRVEPKSC

SEQ ID NO: 12 - protein, 6 aa, Artificial Sequence
  His Tag
HHHHHH

SEQ ID NO: 13 - protein, 8 aa, Artificial Sequence
  Flag Tag
DYKDDDDK

SEQ ID NO: 14 - protein, 10 aa, Artificial Sequence
  Cetuximab CDRH1
GFSLTNYGVH

SEQ ID NO: 15 - protein, 5 aa, Artificial Sequence
  Cetuximab CDRH1
NYGVH

SEQ ID NO: 16 - protein, 16 aa, Artificial Sequence
  Cetuximab CDRH2
VIWSGGNTDYNTPFTS

SEQ ID NO: 17 - protein, 11 aa, Artificial Sequence
  Cetuximab CDRH3
ALTYYDYEFAY

SEQ ID NO: 18 - protein, 11 aa, Artificial Sequence
  Cetuximab CDRL1
RASQSIGTNIH

SEQ ID NO: 19 - protein, 7 aa, Artificial Sequence
  Cetuximab CDRL2
YASESIS

SEQ ID NO: 20 - protein, 9 aa, Artificial Sequence
  Cetuximab CDRL3
QQNNNWPTT

SEQ ID NO: 21 - protein, 15 aa, Artificial Sequence
  (Gly4Ser)3 Linker
GGGGSGGGGSGGGGS

SEQ ID NO: 22 - protein, 330 aa, Homo sapiens [sequence omitted]

SEQ ID NO: 23 - protein, 326 aa, Homo sapiens
  hIgG2
ASTKGPSVFPLAPCSRSTSESTAALGCLVKDYFPEPVTVSWNSGALTSGVHTFPAVLQSSGLYSLSSVVTVPSSNFGTQTYTCNVDHKPSNTKVDKTVERKCCVECPPCPAPPVAGPSVFLFPPKPKDTLMISRTPEVTCVVVDVSHEDPEVQFNWYVDGVEVHNAKTKPREEQFNSTFRVVSVLTVVHQDWLNGKEYKCKVSNKGLPAPIEKTISKTKGQPREPQVYTLPPSREEMTKNQVSLTCLVKGFYPSDIAVEWESNGQPENNYKTTPPMLDSDGSFFLYSKLTVDKSRWQQGNVFSCSVMHEALHNHYTQKSLSLSPGK

SEQ ID NO: 24 - protein, 377 aa, Homo sapiens
  IgG3
ASTKGPSVFPLAPCSRSTSGGTAALGCLVKDYFPEPVTVSWNSGALTSGVHTFPAVLQSSGLYSLSSVVTVPSSSLGTQTYTCNVNHKPSNTKVDKRVELKTPLGDTTHTCPRCPEPKSCDTPPPCPRCPEPKSCDTPPPCPRCPEPKSCDTPPPCPRCPAPELLGGPSVFLFPPKPKDTLMISRTPEVTCVVVDVSHEDPEVQFKWYVDGVEVHNAKTKPREEQYNSTFRVVSVLTVLHQDWLNGKEYKCKVSNKALPAPIEKTISKTKGQPREPQVYTLPPSREEMTKNQVSLTCLVKGFYPSDIAVEWESSGQPENNYNTTPPMLDSDGSFFLYSKLTVDKSRWQQGNIFSCSVMHEALHNRFTQKSLSLSPGK

SEQ ID NO: 25 - protein, 327 aa, Artificial Sequence
  IgG4
ASTKGPSVFPLAPCSRSTSESTAALGCLVKDYFPEPVTVSWNSGALTSGVHTFPAVLQSSGLYSLSSVVTVPSSSLGTKTYTCNVDHKPSNTKVDKRVESKYGPPCPSCPAPEFLGGPSVFLFPPKPKDTLMISRTPEVTCVVVDVSQEDPEVQFNWYVDGVEVHNAKTKPREEQFNSTYRVVSVLTVLHQDWLNGKEYKCKVSNKGLPSSIEKTISKAKGQPREPQVYTLPPSQEEMTKNQVSLTCLVKGFYPSDIAVEWESNGQPENNYKTTPPVLDSDGSFFLYSRLTVDKSRWQEGNVFSCSVMHEALHNHYTQKSLSLSLGK

SEQ ID NO: 26 - protein, 231 aa, Artificial Sequence
  hIgG1 Fc
PKSCDKTHTCPPCPAPELLGGPSVFLFPPKPKDTLMISRTPEVTCVVVDVSHEDPEVKFNWYVDGVEVHNAKTKPREEQYNSTYRVVSVLTVLHQDWLNGKEYKCKVSNKALPAPIEKTISKAKGQPREPQVYTLPPSRDELTKNQVSLTCLVKGFYPSDIAVEWESNGQPENNYKTTPPVLDSDGSFFLYSKLTVDKSRWQQGNVFSCSVMHEALHNHYTQKSLSLSPGK

SEQ ID NO: 27 - protein, 232 aa, Artificial Sequence
  hIgG1 native C-terminus of Fc region
EPRSCDKTHTCPPCPAPELLGGPSVFLFPPKPKDTLMISRTPEVTCVVVDVSHEDPEVKFNWYVDGVEVHNAKTKPREEQYNSTYRVVSVLTVLHQDWLNGKDYKCKVSNKALPAPMQKTISKAKGQPREPQVYTLPPSRDELTKNQVSLTCLVKGFYPRHIAVEWESNGQPENNYKTTPPVLDSDGSFFLYSKLTVDKSRWQQGNVFSCSVMHEALHNHYTQKSLSLSPGK

SEQ ID NO: 28 - protein, 119 aa, Artificial Sequence
  Hu225 Heavy Chain Variable Region
EVQLVESGGGLVQPGGSLRLSCAASGFSLTNYGVHWVRQAPGKGLEWLGVIWSGGNTDYNTPFTSRLTINKDNSKNTVYLQMNSLRAEDTAVYYCARALTYYDYEFAYWGQGTLVTVSS

SEQ ID NO: 29 - protein, 107 aa, Artificial Sequence
  Hu225 Light Chain Variable Region
DILLTQSPGTLSLSPGERATLSCRASQSIGTNIHWYQQKPGQAPRLLIKYASESISGIPDRFSGSGSGTDFTLTISRLEPEDFAVYYCQQNNNWPTTFGQGTKLEIK

SEQ ID NO: 30 - protein, 119 aa, Artificial Sequence
  Variable HC	T023K
QVQLKQSGPGLVQPSQSLSITCKVSGFSLTNYGVHWVRQSPGKGLEWLGVIWSGGNTDYNTPFTSRLSINKDNSKSQVFFKMNSLQSNDTAIYYCARALTYYDYEFAYWGQGTLVTVSA

SEQ ID NO: 31 - protein, 119 aa, Artificial Sequence
  Variable HC T023H
QVQLKQSGPGLVQPSQSLSITCHVSGFSLTNYGVHWVRQSPGKGLEWLGVIWSGGNTDYNTPFTSRLSINKDNSKSQVFFKMNSLQSNDTAIYYCARALTYYDYEFAYWGQGTLVTVSA

SEQ ID NO: 32 - protein, 119 aa, Artificial Sequence
  Variable HC T023R
QVQLKQSGPGLVQPSQSLSITCRVSGFSLTNYGVHWVRQSPGKGLEWLGVIWSGGNTDYNTPFTSRLSINKDNSKSQVFFKMNSLQSNDTAIYYCARALTYYDYEFAYWGQGTLVTVSA

SEQ ID NO: 33 - protein, 119 aa, Artificial Sequence
  Variable HC T023A
QVQLKQSGPGLVQPSQSLSITCAVSGFSLTNYGVHWVRQSPGKGLEWLGVIWSGGNTDYNTPFTSRLSINKDNSKSQVFFKMNSLQSNDTAIYYCARALTYYDYEFAYWGQGTLVTVSA

SEQ ID NO: 34 - protein, 119 aa, Artificial Sequence
  Variable HC T023C
QVQLKQSGPGLVQPSQSLSITCCVSGFSLTNYGVHWVRQSPGKGLEWLGVIWSGGNTDYNTPFTSRLSINKDNSKSQVFFKMNSLQSNDTAIYYCARALTYYDYEFAYWGQGTLVTVSA

SEQ ID NO: 35 - protein, 119 aa, Artificial Sequence
  Variable HC T023E
QVQLKQSGPGLVQPSQSLSITCEVSGFSLTNYGVHWVRQSPGKGLEWLGVIWSGGNTDYNTPFTSRLSINKDNSKSQVFFKMNSLQSNDTAIYYCARALTYYDYEFAYWGQGTLVTVSA

SEQ ID NO: 36 - protein, 119 aa, Artificial Sequence
  Variable HC T023G
QVQLKQSGPGLVQPSQSLSITCGVSGFSLTNYGVHWVRQSPGKGLEWLGVIWSGGNTDYNTPFTSRLSINKDNSKSQVFFKMNSLQSNDTAIYYCARALTYYDYEFAYWGQGTLVTVSA

SEQ ID NO: 37 - protein, 119 aa, Artificial Sequence
  Variable HC T023I
QVQLKQSGPGLVQPSQSLSITCIVSGFSLTNYGVHWVRQSPGKGLEWLGVIWSGGNTDYNTPFTSRLSINKDNSKSQVFFKMNSLQSNDTAIYYCARALTYYDYEFAYWGQGTLVTVSA

SEQ ID NO: 38 - protein, 119 aa, Artificial Sequence
  Variable HC T023M
QVQLKQSGPGLVQPSQSLSITCMVSGFSLTNYGVHWVRQSPGKGLEWLGVIWSGGNTDYNTPFTSRLSINKDNSKSQVFFKMNSLQSNDTAIYYCARALTYYDYEFAYWGQGTLVTVSA

SEQ ID NO: 39 - protein, 119 aa, Artificial Sequence
  Variable HC T023N
QVQLKQSGPGLVQPSQSLSITCNVSGFSLTNYGVHWVRQSPGKGLEWLGVIWSGGNTDYNTPFTSRLSINKDNSKSQVFFKMNSLQSNDTAIYYCARALTYYDYEFAYWGQGTLVTVSA

SEQ ID NO: 40 - protein, 119 aa, Artificial Sequence
  Variable HC T023P
QVQLKQSGPGLVQPSQSLSITCPVSGFSLTNYGVHWVRQSPGKGLEWLGVIWSGGNTDYNTPFTSRLSINKDNSKSQVFFKMNSLQSNDTAIYYCARALTYYDYEFAYWGQGTLVTVSA

SEQ ID NO: 41 - protein, 119 aa, Artificial Sequence
  Variable HC T023S
QVQLKQSGPGLVQPSQSLSITCSVSGFSLTNYGVHWVRQSPGKGLEWLGVIWSGGNTDYNTPFTSRLSINKDNSKSQVFFKMNSLQSNDTAIYYCARALTYYDYEFAYWGQGTLVTVSA

SEQ ID NO: 42 - protein, 119 aa, Artificial Sequence
  Variable HC T023V
QVQLKQSGPGLVQPSQSLSITCVVSGFSLTNYGVHWVRQSPGKGLEWLGVIWSGGNTDYNTPFTSRLSINKDNSKSQVFFKMNSLQSNDTAIYYCARALTYYDYEFAYWGQGTLVTVSA

SEQ ID NO: 43 - protein, 119 aa, Artificial Sequence
  Variable HC T023W
QVQLKQSGPGLVQPSQSLSITCWVSGFSLTNYGVHWVRQSPGKGLEWLGVIWSGGNTDYNTPFTSRLSINKDNSKSQVFFKMNSLQSNDTAIYYCARALTYYDYEFAYWGQGTLVTVSA

SEQ ID NO: 44 - protein, 119 aa, Artificial Sequence
  Variable HC T023L
QVQLKQSGPGLVQPSQSLSITCLVSGFSLTNYGVHWVRQSPGKGLEWLGVIWSGGNTDYNTPFTSRLSINKDNSKSQVFFKMNSLQSNDTAIYYCARALTYYDYEFAYWGQGTLVTVSA

SEQ ID NO: 45 - protein, 119 aa, Artificial Sequence
  Variable HC V024R
QVQLKQSGPGLVQPSQSLSITCTRSGFSLTNYGVHWVRQSPGKGLEWLGVIWSGGNTDYNTPFTSRLSINKDNSKSQVFFKMNSLQSNDTAIYYCARALTYYDYEFAYWGQGTLVTVSA

SEQ ID NO: 46 - protein, 119 aa, Artificial Sequence
  Variable HC	V024A
QVQLKQSGPGLVQPSQSLSITCTASGFSLTNYGVHWVRQSPGKGLEWLGVIWSGGNTDYNTPFTSRLSINKDNSKSQVFFKMNSLQSNDTAIYYCARALTYYDYEFAYWGQGTLVTVSA

SEQ ID NO: 47 - protein, 119 aa, Artificial Sequence
  Variable HC V024F
QVQLKQSGPGLVQPSQSLSITCTFSGFSLTNYGVHWVRQSPGKGLEWLGVIWSGGNTDYNTPFTSRLSINKDNSKSQVFFKMNSLQSNDTAIYYCARALTYYDYEFAYWGQGTLVTVSA

SEQ ID NO: 48 - protein, 119 aa, Artificial Sequence
  Variable HC	V024G
QVQLKQSGPGLVQPSQSLSITCTGSGFSLTNYGVHWVRQSPGKGLEWLGVIWSGGNTDYNTPFTSRLSINKDNSKSQVFFKMNSLQSNDTAIYYCARALTYYDYEFAYWGQGTLVTVSA

SEQ ID NO: 49 - protein, 119 aa, Artificial Sequence
  Variable HC	V024I
QVQLKQSGPGLVQPSQSLSITCTISGFSLTNYGVHWVRQSPGKGLEWLGVIWSGGNTDYNTPFTSRLSINKDNSKSQVFFKMNSLQSNDTAIYYCARALTYYDYEFAYWGQGTLVTVSA

SEQ ID NO: 50 - protein, 119 aa, Artificial Sequence
  Variable HC V024M
QVQLKQSGPGLVQPSQSLSITCTMSGFSLTNYGVHWVRQSPGKGLEWLGVIWSGGNTDYNTPFTSRLSINKDNSKSQVFFKMNSLQSNDTAIYYCARALTYYDYEFAYWGQGTLVTVSA

SEQ ID NO: 51 - protein, 119 aa, Artificial Sequence
  Variable HC	V024P
QVQLKQSGPGLVQPSQSLSITCTPSGFSLTNYGVHWVRQSPGKGLEWLGVIWSGGNTDYNTPFTSRLSINKDNSKSQVFFKMNSLQSNDTAIYYCARALTYYDYEFAYWGQGTLVTVSA

SEQ ID NO: 52 - protein, 119 aa, Artificial Sequence
  Variable HC	V024S
QVQLKQSGPGLVQPSQSLSITCTSSGFSLTNYGVHWVRQSPGKGLEWLGVIWSGGNTDYNTPFTSRLSINKDNSKSQVFFKMNSLQSNDTAIYYCARALTYYDYEFAYWGQGTLVTVSA

SEQ ID NO: 53 - protein, 119 aa, Artificial Sequence
  Variable HC	V024T
QVQLKQSGPGLVQPSQSLSITCTTSGFSLTNYGVHWVRQSPGKGLEWLGVIWSGGNTDYNTPFTSRLSINKDNSKSQVFFKMNSLQSNDTAIYYCARALTYYDYEFAYWGQGTLVTVSA

SEQ ID NO: 54 - protein, 119 aa, Artificial Sequence
  Variable HC	V024L
QVQLKQSGPGLVQPSQSLSITCTLSGFSLTNYGVHWVRQSPGKGLEWLGVIWSGGNTDYNTPFTSRLSINKDNSKSQVFFKMNSLQSNDTAIYYCARALTYYDYEFAYWGQGTLVTVSA

SEQ ID NO: 55 - protein, 119 aa, Artificial Sequence
  Variable HC	S025H
QVQLKQSGPGLVQPSQSLSITCTVHGFSLTNYGVHWVRQSPGKGLEWLGVIWSGGNTDYNTPFTSRLSINKDNSKSQVFFKMNSLQSNDTAIYYCARALTYYDYEFAYWGQGTLVTVSA

SEQ ID NO: 56 - protein, 119 aa, Artificial Sequence
  Variable HC	S025R
QVQLKQSGPGLVQPSQSLSITCTVRGFSLTNYGVHWVRQSPGKGLEWLGVIWSGGNTDYNTPFTSRLSINKDNSKSQVFFKMNSLQSNDTAIYYCARALTYYDYEFAYWGQGTLVTVSA

SEQ ID NO: 57 - protein, 119 aa, Artificial Sequence
  Variable HC	S025A
QVQLKQSGPGLVQPSQSLSITCTVAGFSLTNYGVHWVRQSPGKGLEWLGVIWSGGNTDYNTPFTSRLSINKDNSKSQVFFKMNSLQSNDTAIYYCARALTYYDYEFAYWGQGTLVTVSA

SEQ ID NO: 58 - protein, 119 aa, Artificial Sequence
  Variable HC	S025C
QVQLKQSGPGLVQPSQSLSITCTVCGFSLTNYGVHWVRQSPGKGLEWLGVIWSGGNTDYNTPFTSRLSINKDNSKSQVFFKMNSLQSNDTAIYYCARALTYYDYEFAYWGQGTLVTVSA

SEQ ID NO: 59 - protein, 119 aa, Artificial Sequence
  Variable HC	S025D
QVQLKQSGPGLVQPSQSLSITCTVDGFSLTNYGVHWVRQSPGKGLEWLGVIWSGGNTDYNTPFTSRLSINKDNSKSQVFFKMNSLQSNDTAIYYCARALTYYDYEFAYWGQGTLVTVSA

SEQ ID NO: 60 - protein, 119 aa, Artificial Sequence
  Variable HC	S025E
QVQLKQSGPGLVQPSQSLSITCTVEGFSLTNYGVHWVRQSPGKGLEWLGVIWSGGNTDYNTPFTSRLSINKDNSKSQVFFKMNSLQSNDTAIYYCARALTYYDYEFAYWGQGTLVTVSA

SEQ ID NO: 61 - protein, 119 aa, Artificial Sequence
  Variable HC	S025F
QVQLKQSGPGLVQPSQSLSITCTVFGFSLTNYGVHWVRQSPGKGLEWLGVIWSGGNTDYNTPFTSRLSINKDNSKSQVFFKMNSLQSNDTAIYYCARALTYYDYEFAYWGQGTLVTVSA

SEQ ID NO: 62 - protein, 119 aa, Artificial Sequence
  Variable HC	S025G
QVQLKQSGPGLVQPSQSLSITCTVGGFSLTNYGVHWVRQSPGKGLEWLGVIWSGGNTDYNTPFTSRLSINKDNSKSQVFFKMNSLQSNDTAIYYCARALTYYDYEFAYWGQGTLVTVSA

SEQ ID NO: 63 - protein, 119 aa, Artificial Sequence
  Variable HC	S025I
QVQLKQSGPGLVQPSQSLSITCTVIGFSLTNYGVHWVRQSPGKGLEWLGVIWSGGNTDYNTPFTSRLSINKDNSKSQVFFKMNSLQSNDTAIYYCARALTYYDYEFAYWGQGTLVTVSA

SEQ ID NO: 64 - protein, 119 aa, Artificial Sequence
  Variable HC S025M
QVQLKQSGPGLVQPSQSLSITCTVMGFSLTNYGVHWVRQSPGKGLEWLGVIWSGGNTDYNTPFTSRLSINKDNSKSQVFFKMNSLQSNDTAIYYCARALTYYDYEFAYWGQGTLVTVSA

SEQ ID NO: 65 - protein, 119 aa, Artificial Sequence
  Variable HC	S025P
QVQLKQSGPGLVQPSQSLSITCTVPGFSLTNYGVHWVRQSPGKGLEWLGVIWSGGNTDYNTPFTSRLSINKDNSKSQVFFKMNSLQSNDTAIYYCARALTYYDYEFAYWGQGTLVTVSA

SEQ ID NO: 66 - protein, 119 aa, Artificial Sequence
  Variable HC	S025Q
QVQLKQSGPGLVQPSQSLSITCTVQGFSLTNYGVHWVRQSPGKGLEWLGVIWSGGNTDYNTPFTSRLSINKDNSKSQVFFKMNSLQSNDTAIYYCARALTYYDYEFAYWGQGTLVTVSA

SEQ ID NO: 67 - protein, 119 aa, Artificial Sequence
  Variable HC	S025T
QVQLKQSGPGLVQPSQSLSITCTVTGFSLTNYGVHWVRQSPGKGLEWLGVIWSGGNTDYNTPFTSRLSINKDNSKSQVFFKMNSLQSNDTAIYYCARALTYYDYEFAYWGQGTLVTVSA

SEQ ID NO: 68 - protein, 119 aa, Artificial Sequence
  Variable HC	S025V
QVQLKQSGPGLVQPSQSLSITCTVVGFSLTNYGVHWVRQSPGKGLEWLGVIWSGGNTDYNTPFTSRLSINKDNSKSQVFFKMNSLQSNDTAIYYCARALTYYDYEFAYWGQGTLVTVSA

SEQ ID NO: 69 - protein, 119 aa, Artificial Sequence
  Variable HC	S025L
QVQLKQSGPGLVQPSQSLSITCTVLGFSLTNYGVHWVRQSPGKGLEWLGVIWSGGNTDYNTPFTSRLSINKDNSKSQVFFKMNSLQSNDTAIYYCARALTYYDYEFAYWGQGTLVTVSA

SEQ ID NO: 70 - protein, 119 aa, Artificial Sequence
  Variable HC	G026H
QVQLKQSGPGLVQPSQSLSITCTVSHFSLTNYGVHWVRQSPGKGLEWLGVIWSGGNTDYNTPFTSRLSINKDNSKSQVFFKMNSLQSNDTAIYYCARALTYYDYEFAYWGQGTLVTVSA

SEQ ID NO: 71 - protein, 119 aa, Artificial Sequence
  Variable HC	G026R
QVQLKQSGPGLVQPSQSLSITCTVSRFSLTNYGVHWVRQSPGKGLEWLGVIWSGGNTDYNTPFTSRLSINKDNSKSQVFFKMNSLQSNDTAIYYCARALTYYDYEFAYWGQGTLVTVSA

SEQ ID NO: 72 - protein, 119 aa, Artificial Sequence
  Variable HC	G026D
QVQLKQSGPGLVQPSQSLSITCTVSDFSLTNYGVHWVRQSPGKGLEWLGVIWSGGNTDYNTPFTSRLSINKDNSKSQVFFKMNSLQSNDTAIYYCARALTYYDYEFAYWGQGTLVTVSA

SEQ ID NO: 73 - protein, 119 aa, Artificial Sequence
  Variable HC	G026F
QVQLKQSGPGLVQPSQSLSITCTVSFFSLTNYGVHWVRQSPGKGLEWLGVIWSGGNTDYNTPFTSRLSINKDNSKSQVFFKMNSLQSNDTAIYYCARALTYYDYEFAYWGQGTLVTVSA

SEQ ID NO: 74 - protein, 119 aa, Artificial Sequence
  Variable HC	G026M
QVQLKQSGPGLVQPSQSLSITCTVSMFSLTNYGVHWVRQSPGKGLEWLGVIWSGGNTDYNTPFTSRLSINKDNSKSQVFFKMNSLQSNDTAIYYCARALTYYDYEFAYWGQGTLVTVSA

SEQ ID NO: 75 - protein, 119 aa, Artificial Sequence
  Variable HC	G026N
QVQLKQSGPGLVQPSQSLSITCTVSNFSLTNYGVHWVRQSPGKGLEWLGVIWSGGNTDYNTPFTSRLSINKDNSKSQVFFKMNSLQSNDTAIYYCARALTYYDYEFAYWGQGTLVTVSA

SEQ ID NO: 76 - protein, 119 aa, Artificial Sequence
  Variable HC	G026P
QVQLKQSGPGLVQPSQSLSITCTVSPFSLTNYGVHWVRQSPGKGLEWLGVIWSGGNTDYNTPFTSRLSINKDNSKSQVFFKMNSLQSNDTAIYYCARALTYYDYEFAYWGQGTLVTVSA

SEQ ID NO: 77 - protein, 119 aa, Artificial Sequence
  Variable HC	G026Q
QVQLKQSGPGLVQPSQSLSITCTVSQFSLTNYGVHWVRQSPGKGLEWLGVIWSGGNTDYNTPFTSRLSINKDNSKSQVFFKMNSLQSNDTAIYYCARALTYYDYEFAYWGQGTLVTVSA

SEQ ID NO: 78 - protein, 119 aa, Artificial Sequence
  Variable HC	G026S
QVQLKQSGPGLVQPSQSLSITCTVSSFSLTNYGVHWVRQSPGKGLEWLGVIWSGGNTDYNTPFTSRLSINKDNSKSQVFFKMNSLQSNDTAIYYCARALTYYDYEFAYWGQGTLVTVSA

SEQ ID NO: 79 - protein, 119 aa, Artificial Sequence
  Variable HC	G026Y
QVQLKQSGPGLVQPSQSLSITCTVSYFSLTNYGVHWVRQSPGKGLEWLGVIWSGGNTDYNTPFTSRLSINKDNSKSQVFFKMNSLQSNDTAIYYCARALTYYDYEFAYWGQGTLVTVSA

SEQ ID NO: 80 - protein, 119 aa, Artificial Sequence
  Variable HC	G026L
QVQLKQSGPGLVQPSQSLSITCTVSLFSLTNYGVHWVRQSPGKGLEWLGVIWSGGNTDYNTPFTSRLSINKDNSKSQVFFKMNSLQSNDTAIYYCARALTYYDYEFAYWGQGTLVTVSA

SEQ ID NO: 81 - protein, 119 aa, Artificial Sequence
  Variable HC	F027H
QVQLKQSGPGLVQPSQSLSITCTVSGHSLTNYGVHWVRQSPGKGLEWLGVIWSGGNTDYNTPFTSRLSINKDNSKSQVFFKMNSLQSNDTAIYYCARALTYYDYEFAYWGQGTLVTVSA

SEQ ID NO: 82 - protein, 119 aa, Artificial Sequence
  Variable HC	F027R
QVQLKQSGPGLVQPSQSLSITCTVSGRSLTNYGVHWVRQSPGKGLEWLGVIWSGGNTDYNTPFTSRLSINKDNSKSQVFFKMNSLQSNDTAIYYCARALTYYDYEFAYWGQGTLVTVSA

SEQ ID NO: 83 - protein, 119 aa, Artificial Sequence
  Variable HC	F027A
QVQLKQSGPGLVQPSQSLSITCTVSGASLTNYGVHWVRQSPGKGLEWLGVIWSGGNTDYNTPFTSRLSINKDNSKSQVFFKMNSLQSNDTAIYYCARALTYYDYEFAYWGQGTLVTVSA

SEQ ID NO: 84 - protein, 119 aa, Artificial Sequence
  Variable HC	F027D
QVQLKQSGPGLVQPSQSLSITCTVSGDSLTNYGVHWVRQSPGKGLEWLGVIWSGGNTDYNTPFTSRLSINKDNSKSQVFFKMNSLQSNDTAIYYCARALTYYDYEFAYWGQGTLVTVSA

SEQ ID NO: 85 - protein, 119 aa, Artificial Sequence
  Variable HC	F027E
QVQLKQSGPGLVQPSQSLSITCTVSGESLTNYGVHWVRQSPGKGLEWLGVIWSGGNTDYNTPFTSRLSINKDNSKSQVFFKMNSLQSNDTAIYYCARALTYYDYEFAYWGQGTLVTVSA

SEQ ID NO: 86 - protein, 119 aa, Artificial Sequence
  Variable HC	F027G
QVQLKQSGPGLVQPSQSLSITCTVSGGSLTNYGVHWVRQSPGKGLEWLGVIWSGGNTDYNTPFTSRLSINKDNSKSQVFFKMNSLQSNDTAIYYCARALTYYDYEFAYWGQGTLVTVSA

SEQ ID NO: 87 - protein, 119 aa, Artificial Sequence
  Variable HC	F027M
QVQLKQSGPGLVQPSQSLSITCTVSGMSLTNYGVHWVRQSPGKGLEWLGVIWSGGNTDYNTPFTSRLSINKDNSKSQVFFKMNSLQSNDTAIYYCARALTYYDYEFAYWGQGTLVTVSA

SEQ ID NO: 88 - protein, 119 aa, Artificial Sequence
  Variable HC	F027P
QVQLKQSGPGLVQPSQSLSITCTVSGPSLTNYGVHWVRQSPGKGLEWLGVIWSGGNTDYNTPFTSRLSINKDNSKSQVFFKMNSLQSNDTAIYYCARALTYYDYEFAYWGQGTLVTVSA

SEQ ID NO: 89 - protein, 119 aa, Artificial Sequence
  Variable HC	F027Q
QVQLKQSGPGLVQPSQSLSITCTVSGQSLTNYGVHWVRQSPGKGLEWLGVIWSGGNTDYNTPFTSRLSINKDNSKSQVFFKMNSLQSNDTAIYYCARALTYYDYEFAYWGQGTLVTVSA

SEQ ID NO: 90 - protein, 119 aa, Artificial Sequence
  Variable HC	F027S
QVQLKQSGPGLVQPSQSLSITCTVSGSSLTNYGVHWVRQSPGKGLEWLGVIWSGGNTDYNTPFTSRLSINKDNSKSQVFFKMNSLQSNDTAIYYCARALTYYDYEFAYWGQGTLVTVSA

SEQ ID NO: 91 - protein, 119 aa, Artificial Sequence
  Variable HC	F027T
QVQLKQSGPGLVQPSQSLSITCTVSGTSLTNYGVHWVRQSPGKGLEWLGVIWSGGNTDYNTPFTSRLSINKDNSKSQVFFKMNSLQSNDTAIYYCARALTYYDYEFAYWGQGTLVTVSA

SEQ ID NO: 92 - protein, 119 aa, Artificial Sequence
  Variable HC	F027V
QVQLKQSGPGLVQPSQSLSITCTVSGVSLTNYGVHWVRQSPGKGLEWLGVIWSGGNTDYNTPFTSRLSINKDNSKSQVFFKMNSLQSNDTAIYYCARALTYYDYEFAYWGQGTLVTVSA

SEQ ID NO: 93 - protein, 119 aa, Artificial Sequence
  Variable HC	F027W
QVQLKQSGPGLVQPSQSLSITCTVSGWSLTNYGVHWVRQSPGKGLEWLGVIWSGGNTDYNTPFTSRLSINKDNSKSQVFFKMNSLQSNDTAIYYCARALTYYDYEFAYWGQGTLVTVSA

SEQ ID NO: 94 - protein, 119 aa, Artificial Sequence
  Variable HC	F027Y
QVQLKQSGPGLVQPSQSLSITCTVSGYSLTNYGVHWVRQSPGKGLEWLGVIWSGGNTDYNTPFTSRLSINKDNSKSQVFFKMNSLQSNDTAIYYCARALTYYDYEFAYWGQGTLVTVSA

SEQ ID NO: 95 - protein, 119 aa, Artificial Sequence
  Variable HC	F027L
QVQLKQSGPGLVQPSQSLSITCTVSGLSLTNYGVHWVRQSPGKGLEWLGVIWSGGNTDYNTPFTSRLSINKDNSKSQVFFKMNSLQSNDTAIYYCARALTYYDYEFAYWGQGTLVTVSA

SEQ ID NO: 96 - protein, 119 aa, Artificial Sequence
  Variable HC	S028K
QVQLKQSGPGLVQPSQSLSITCTVSGFKLTNYGVHWVRQSPGKGLEWLGVIWSGGNTDYNTPFTSRLSINKDNSKSQVFFKMNSLQSNDTAIYYCARALTYYDYEFAYWGQGTLVTVSA

SEQ ID NO: 97 - protein, 119 aa, Artificial Sequence
  Variable HC	S028H
QVQLKQSGPGLVQPSQSLSITCTVSGFHLTNYGVHWVRQSPGKGLEWLGVIWSGGNTDYNTPFTSRLSINKDNSKSQVFFKMNSLQSNDTAIYYCARALTYYDYEFAYWGQGTLVTVSA

SEQ ID NO: 98 - protein, 119 aa, Artificial Sequence
  Variable HC	S028R
QVQLKQSGPGLVQPSQSLSITCTVSGFRLTNYGVHWVRQSPGKGLEWLGVIWSGGNTDYNTPFTSRLSINKDNSKSQVFFKMNSLQSNDTAIYYCARALTYYDYEFAYWGQGTLVTVSA

SEQ ID NO: 99 - protein, 119 aa, Artificial Sequence
  Variable HC	S028A
QVQLKQSGPGLVQPSQSLSITCTVSGFALTNYGVHWVRQSPGKGLEWLGVIWSGGNTDYNTPFTSRLSINKDNSKSQVFFKMNSLQSNDTAIYYCARALTYYDYEFAYWGQGTLVTVSA

SEQ ID NO: 100 - protein, 119 aa, Artificial Sequence
  Variable HC	S028D
QVQLKQSGPGLVQPSQSLSITCTVSGFDLTNYGVHWVRQSPGKGLEWLGVIWSGGNTDYNTPFTSRLSINKDNSKSQVFFKMNSLQSNDTAIYYCARALTYYDYEFAYWGQGTLVTVSA

SEQ ID NO: 101 - protein, 119 aa, Artificial Sequence
  Variable HC	S028I
QVQLKQSGPGLVQPSQSLSITCTVSGFILTNYGVHWVRQSPGKGLEWLGVIWSGGNTDYNTPFTSRLSINKDNSKSQVFFKMNSLQSNDTAIYYCARALTYYDYEFAYWGQGTLVTVSA

SEQ ID NO: 102 - protein, 119 aa, Artificial Sequence
  Variable HC	S028M
QVQLKQSGPGLVQPSQSLSITCTVSGFMLTNYGVHWVRQSPGKGLEWLGVIWSGGNTDYNTPFTSRLSINKDNSKSQVFFKMNSLQSNDTAIYYCARALTYYDYEFAYWGQGTLVTVSA

SEQ ID NO: 103 - protein, 119 aa, Artificial Sequence
  Variable HC	S028P
QVQLKQSGPGLVQPSQSLSITCTVSGFPLTNYGVHWVRQSPGKGLEWLGVIWSGGNTDYNTPFTSRLSINKDNSKSQVFFKMNSLQSNDTAIYYCARALTYYDYEFAYWGQGTLVTVSA

SEQ ID NO: 104 - protein, 119 aa, Artificial Sequence
  Variable HC	S028Q
QVQLKQSGPGLVQPSQSLSITCTVSGFQLTNYGVHWVRQSPGKGLEWLGVIWSGGNTDYNTPFTSRLSINKDNSKSQVFFKMNSLQSNDTAIYYCARALTYYDYEFAYWGQGTLVTVSA

SEQ ID NO: 105 - protein, 119 aa, Artificial Sequence
  Variable HC	S028V
QVQLKQSGPGLVQPSQSLSITCTVSGFVLTNYGVHWVRQSPGKGLEWLGVIWSGGNTDYNTPFTSRLSINKDNSKSQVFFKMNSLQSNDTAIYYCARALTYYDYEFAYWGQGTLVTVSA

SEQ ID NO: 106 - protein, 119 aa, Artificial Sequence
  Variable HC	S028W
QVQLKQSGPGLVQPSQSLSITCTVSGFWLTNYGVHWVRQSPGKGLEWLGVIWSGGNTDYNTPFTSRLSINKDNSKSQVFFKMNSLQSNDTAIYYCARALTYYDYEFAYWGQGTLVTVSA

SEQ ID NO: 107 - protein, 119 aa, Artificial Sequence
  Variable HC	S028L
QVQLKQSGPGLVQPSQSLSITCTVSGFLLTNYGVHWVRQSPGKGLEWLGVIWSGGNTDYNTPFTSRLSINKDNSKSQVFFKMNSLQSNDTAIYYCARALTYYDYEFAYWGQGTLVTVSA

SEQ ID NO: 108 - protein, 119 aa, Artificial Sequence
  Variable HC	L029K
QVQLKQSGPGLVQPSQSLSITCTVSGFSKTNYGVHWVRQSPGKGLEWLGVIWSGGNTDYNTPFTSRLSINKDNSKSQVFFKMNSLQSNDTAIYYCARALTYYDYEFAYWGQGTLVTVSA

SEQ ID NO: 109 - protein, 119 aa, Artificial Sequence
  Variable HC	L029H
QVQLKQSGPGLVQPSQSLSITCTVSGFSHTNYGVHWVRQSPGKGLEWLGVIWSGGNTDYNTPFTSRLSINKDNSKSQVFFKMNSLQSNDTAIYYCARALTYYDYEFAYWGQGTLVTVSA

SEQ ID NO: 110 - protein, 119 aa, Artificial Sequence
  Variable HC	L029A
QVQLKQSGPGLVQPSQSLSITCTVSGFSATNYGVHWVRQSPGKGLEWLGVIWSGGNTDYNTPFTSRLSINKDNSKSQVFFKMNSLQSNDTAIYYCARALTYYDYEFAYWGQGTLVTVSA

SEQ ID NO: 111 - protein, 119 aa, Artificial Sequence
  Variable HC	L029D
QVQLKQSGPGLVQPSQSLSITCTVSGFSDTNYGVHWVRQSPGKGLEWLGVIWSGGNTDYNTPFTSRLSINKDNSKSQVFFKMNSLQSNDTAIYYCARALTYYDYEFAYWGQGTLVTVSA

SEQ ID NO: 112 - protein, 119 aa, Artificial Sequence
  Variable HC	L029G
QVQLKQSGPGLVQPSQSLSITCTVSGFSGTNYGVHWVRQSPGKGLEWLGVIWSGGNTDYNTPFTSRLSINKDNSKSQVFFKMNSLQSNDTAIYYCARALTYYDYEFAYWGQGTLVTVSA

SEQ ID NO: 113 - protein, 119 aa, Artificial Sequence
  Variable HC	L029I
QVQLKQSGPGLVQPSQSLSITCTVSGFSITNYGVHWVRQSPGKGLEWLGVIWSGGNTDYNTPFTSRLSINKDNSKSQVFFKMNSLQSNDTAIYYCARALTYYDYEFAYWGQGTLVTVSA

SEQ ID NO: 114 - protein, 119 aa, Artificial Sequence
  Variable HC	L029M
QVQLKQSGPGLVQPSQSLSITCTVSGFSMTNYGVHWVRQSPGKGLEWLGVIWSGGNTDYNTPFTSRLSINKDNSKSQVFFKMNSLQSNDTAIYYCARALTYYDYEFAYWGQGTLVTVSA

SEQ ID NO: 115 - protein, 119 aa, Artificial Sequence
  Variable HC	L029N
QVQLKQSGPGLVQPSQSLSITCTVSGFSNTNYGVHWVRQSPGKGLEWLGVIWSGGNTDYNTPFTSRLSINKDNSKSQVFFKMNSLQSNDTAIYYCARALTYYDYEFAYWGQGTLVTVSA

SEQ ID NO: 116 - protein, 119 aa, Artificial Sequence
  Variable HC	L029S
QVQLKQSGPGLVQPSQSLSITCTVSGFSSTNYGVHWVRQSPGKGLEWLGVIWSGGNTDYNTPFTSRLSINKDNSKSQVFFKMNSLQSNDTAIYYCARALTYYDYEFAYWGQGTLVTVSA

SEQ ID NO: 117 - protein, 119 aa, Artificial Sequence
  Variable HC	L029V
QVQLKQSGPGLVQPSQSLSITCTVSGFSVTNYGVHWVRQSPGKGLEWLGVIWSGGNTDYNTPFTSRLSINKDNSKSQVFFKMNSLQSNDTAIYYCARALTYYDYEFAYWGQGTLVTVSA

SEQ ID NO: 118 - protein, 119 aa, Artificial Sequence
  Variable HC	T030H
QVQLKQSGPGLVQPSQSLSITCTVSGFSLHNYGVHWVRQSPGKGLEWLGVIWSGGNTDYNTPFTSRLSINKDNSKSQVFFKMNSLQSNDTAIYYCARALTYYDYEFAYWGQGTLVTVSA

SEQ ID NO: 119 - protein, 119 aa, Artificial Sequence
  Variable HC	T030R
QVQLKQSGPGLVQPSQSLSITCTVSGFSLRNYGVHWVRQSPGKGLEWLGVIWSGGNTDYNTPFTSRLSINKDNSKSQVFFKMNSLQSNDTAIYYCARALTYYDYEFAYWGQGTLVTVSA

SEQ ID NO: 120 - protein, 119 aa, Artificial Sequence
  Variable HC	T030D
QVQLKQSGPGLVQPSQSLSITCTVSGFSLDNYGVHWVRQSPGKGLEWLGVIWSGGNTDYNTPFTSRLSINKDNSKSQVFFKMNSLQSNDTAIYYCARALTYYDYEFAYWGQGTLVTVSA

SEQ ID NO: 121 - protein, 119 aa, Artificial Sequence
  Variable HC	T030G
QVQLKQSGPGLVQPSQSLSITCTVSGFSLGNYGVHWVRQSPGKGLEWLGVIWSGGNTDYNTPFTSRLSINKDNSKSQVFFKMNSLQSNDTAIYYCARALTYYDYEFAYWGQGTLVTVSA

SEQ ID NO: 122 - protein, 119 aa, Artificial Sequence
  Variable HC	T030I
QVQLKQSGPGLVQPSQSLSITCTVSGFSLINYGVHWVRQSPGKGLEWLGVIWSGGNTDYNTPFTSRLSINKDNSKSQVFFKMNSLQSNDTAIYYCARALTYYDYEFAYWGQGTLVTVSA

SEQ ID NO: 123 - protein, 119 aa, Artificial Sequence
  Variable HC	T030M
QVQLKQSGPGLVQPSQSLSITCTVSGFSLMNYGVHWVRQSPGKGLEWLGVIWSGGNTDYNTPFTSRLSINKDNSKSQVFFKMNSLQSNDTAIYYCARALTYYDYEFAYWGQGTLVTVSA

SEQ ID NO: 124 - protein, 119 aa, Artificial Sequence
  Variable HC	T030N
QVQLKQSGPGLVQPSQSLSITCTVSGFSLNNYGVHWVRQSPGKGLEWLGVIWSGGNTDYNTPFTSRLSINKDNSKSQVFFKMNSLQSNDTAIYYCARALTYYDYEFAYWGQGTLVTVSA

SEQ ID NO: 125 - protein, 119 aa, Artificial Sequence
  Variable HC	T030P
QVQLKQSGPGLVQPSQSLSITCTVSGFSLPNYGVHWVRQSPGKGLEWLGVIWSGGNTDYNTPFTSRLSINKDNSKSQVFFKMNSLQSNDTAIYYCARALTYYDYEFAYWGQGTLVTVSA

SEQ ID NO: 126 - protein, 119 aa, Artificial Sequence
  Variable HC	T030S
QVQLKQSGPGLVQPSQSLSITCTVSGFSLSNYGVHWVRQSPGKGLEWLGVIWSGGNTDYNTPFTSRLSINKDNSKSQVFFKMNSLQSNDTAIYYCARALTYYDYEFAYWGQGTLVTVSA

SEQ ID NO: 127 - protein, 119 aa, Artificial Sequence
  Variable HC	T030V
QVQLKQSGPGLVQPSQSLSITCTVSGFSLVNYGVHWVRQSPGKGLEWLGVIWSGGNTDYNTPFTSRLSINKDNSKSQVFFKMNSLQSNDTAIYYCARALTYYDYEFAYWGQGTLVTVSA

SEQ ID NO: 128 - protein, 119 aa, Artificial Sequence
  Variable HC	T030W
QVQLKQSGPGLVQPSQSLSITCTVSGFSLWNYGVHWVRQSPGKGLEWLGVIWSGGNTDYNTPFTSRLSINKDNSKSQVFFKMNSLQSNDTAIYYCARALTYYDYEFAYWGQGTLVTVSA

SEQ ID NO: 129 - protein, 119 aa, Artificial Sequence
  Variable HC	T030Y
QVQLKQSGPGLVQPSQSLSITCTVSGFSLYNYGVHWVRQSPGKGLEWLGVIWSGGNTDYNTPFTSRLSINKDNSKSQVFFKMNSLQSNDTAIYYCARALTYYDYEFAYWGQGTLVTVSA

SEQ ID NO: 130 - protein, 119 aa, Artificial Sequence
  Variable HC	N031K
QVQLKQSGPGLVQPSQSLSITCTVSGFSLTKYGVHWVRQSPGKGLEWLGVIWSGGNTDYNTPFTSRLSINKDNSKSQVFFKMNSLQSNDTAIYYCARALTYYDYEFAYWGQGTLVTVSA

SEQ ID NO: 131 - protein, 119 aa, Artificial Sequence
  Variable HC	N031H
QVQLKQSGPGLVQPSQSLSITCTVSGFSLTHYGVHWVRQSPGKGLEWLGVIWSGGNTDYNTPFTSRLSINKDNSKSQVFFKMNSLQSNDTAIYYCARALTYYDYEFAYWGQGTLVTVSA

SEQ ID NO: 132 - protein, 119 aa, Artificial Sequence
  Variable HC	N031D
QVQLKQSGPGLVQPSQSLSITCTVSGFSLTDYGVHWVRQSPGKGLEWLGVIWSGGNTDYNTPFTSRLSINKDNSKSQVFFKMNSLQSNDTAIYYCARALTYYDYEFAYWGQGTLVTVSA

SEQ ID NO: 133 - protein, 119 aa, Artificial Sequence
  Variable HC	N031E
QVQLKQSGPGLVQPSQSLSITCTVSGFSLTEYGVHWVRQSPGKGLEWLGVIWSGGNTDYNTPFTSRLSINKDNSKSQVFFKMNSLQSNDTAIYYCARALTYYDYEFAYWGQGTLVTVSA

SEQ ID NO: 134 - protein, 119 aa, Artificial Sequence
  Variable HC	N031G
QVQLKQSGPGLVQPSQSLSITCTVSGFSLTGYGVHWVRQSPGKGLEWLGVIWSGGNTDYNTPFTSRLSINKDNSKSQVFFKMNSLQSNDTAIYYCARALTYYDYEFAYWGQGTLVTVSA

SEQ ID NO: 135 - protein, 119 aa, Artificial Sequence
  Variable HC	N031I
QVQLKQSGPGLVQPSQSLSITCTVSGFSLTIYGVHWVRQSPGKGLEWLGVIWSGGNTDYNTPFTSRLSINKDNSKSQVFFKMNSLQSNDTAIYYCARALTYYDYEFAYWGQGTLVTVSA

SEQ ID NO: 136 - protein, 119 aa, Artificial Sequence
  Variable HC	N031T
QVQLKQSGPGLVQPSQSLSITCTVSGFSLTTYGVHWVRQSPGKGLEWLGVIWSGGNTDYNTPFTSRLSINKDNSKSQVFFKMNSLQSNDTAIYYCARALTYYDYEFAYWGQGTLVTVSA

SEQ ID NO: 137 - protein, 119 aa, Artificial Sequence
  Variable HC	N031V
QVQLKQSGPGLVQPSQSLSITCTVSGFSLTVYGVHWVRQSPGKGLEWLGVIWSGGNTDYNTPFTSRLSINKDNSKSQVFFKMNSLQSNDTAIYYCARALTYYDYEFAYWGQGTLVTVSA

SEQ ID NO: 138 - protein, 119 aa, Artificial Sequence
  Variable HC	N031L
QVQLKQSGPGLVQPSQSLSITCTVSGFSLTLYGVHWVRQSPGKGLEWLGVIWSGGNTDYNTPFTSRLSINKDNSKSQVFFKMNSLQSNDTAIYYCARALTYYDYEFAYWGQGTLVTVSA

SEQ ID NO: 139 - protein, 119 aa, Artificial Sequence
  Variable HC	Y032H
QVQLKQSGPGLVQPSQSLSITCTVSGFSLTNHGVHWVRQSPGKGLEWLGVIWSGGNTDYNTPFTSRLSINKDNSKSQVFFKMNSLQSNDTAIYYCARALTYYDYEFAYWGQGTLVTVSA

SEQ ID NO: 140 - protein, 119 aa, Artificial Sequence
  Variable HC	Y032R
QVQLKQSGPGLVQPSQSLSITCTVSGFSLTNRGVHWVRQSPGKGLEWLGVIWSGGNTDYNTPFTSRLSINKDNSKSQVFFKMNSLQSNDTAIYYCARALTYYDYEFAYWGQGTLVTVSA

SEQ ID NO: 141 - protein, 119 aa, Artificial Sequence
  Variable HC	Y032C
QVQLKQSGPGLVQPSQSLSITCTVSGFSLTNCGVHWVRQSPGKGLEWLGVIWSGGNTDYNTPFTSRLSINKDNSKSQVFFKMNSLQSNDTAIYYCARALTYYDYEFAYWGQGTLVTVSA

SEQ ID NO: 142 - protein, 119 aa, Artificial Sequence
  Variable HC	Y032M
QVQLKQSGPGLVQPSQSLSITCTVSGFSLTNMGVHWVRQSPGKGLEWLGVIWSGGNTDYNTPFTSRLSINKDNSKSQVFFKMNSLQSNDTAIYYCARALTYYDYEFAYWGQGTLVTVSA

SEQ ID NO: 143 - protein, 119 aa, Artificial Sequence
  Variable HC	Y032N
QVQLKQSGPGLVQPSQSLSITCTVSGFSLTNNGVHWVRQSPGKGLEWLGVIWSGGNTDYNTPFTSRLSINKDNSKSQVFFKMNSLQSNDTAIYYCARALTYYDYEFAYWGQGTLVTVSA

SEQ ID NO: 144 - protein, 119 aa, Artificial Sequence
  Variable HC	Y032T
QVQLKQSGPGLVQPSQSLSITCTVSGFSLTNTGVHWVRQSPGKGLEWLGVIWSGGNTDYNTPFTSRLSINKDNSKSQVFFKMNSLQSNDTAIYYCARALTYYDYEFAYWGQGTLVTVSA

SEQ ID NO: 145 - protein, 119 aa, Artificial Sequence
  Variable HC	Y032V
QVQLKQSGPGLVQPSQSLSITCTVSGFSLTNVGVHWVRQSPGKGLEWLGVIWSGGNTDYNTPFTSRLSINKDNSKSQVFFKMNSLQSNDTAIYYCARALTYYDYEFAYWGQGTLVTVSA

SEQ ID NO: 146 - protein, 119 aa, Artificial Sequence
  Variable HC	Y032L
QVQLKQSGPGLVQPSQSLSITCTVSGFSLTNLGVHWVRQSPGKGLEWLGVIWSGGNTDYNTPFTSRLSINKDNSKSQVFFKMNSLQSNDTAIYYCARALTYYDYEFAYWGQGTLVTVSA

SEQ ID NO: 147 - protein, 119 aa, Artificial Sequence
  Variable HC	G033E
QVQLKQSGPGLVQPSQSLSITCTVSGFSLTNYEVHWVRQSPGKGLEWLGVIWSGGNTDYNTPFTSRLSINKDNSKSQVFFKMNSLQSNDTAIYYCARALTYYDYEFAYWGQGTLVTVSA

SEQ ID NO: 148 - protein, 119 aa, Artificial Sequence
  Variable HC	G033M
QVQLKQSGPGLVQPSQSLSITCTVSGFSLTNYMVHWVRQSPGKGLEWLGVIWSGGNTDYNTPFTSRLSINKDNSKSQVFFKMNSLQSNDTAIYYCARALTYYDYEFAYWGQGTLVTVSA

SEQ ID NO: 149 - protein, 119 aa, Artificial Sequence
  Variable HC	G033S
QVQLKQSGPGLVQPSQSLSITCTVSGFSLTNYSVHWVRQSPGKGLEWLGVIWSGGNTDYNTPFTSRLSINKDNSKSQVFFKMNSLQSNDTAIYYCARALTYYDYEFAYWGQGTLVTVSA

SEQ ID NO: 150 - protein, 119 aa, Artificial Sequence
  Variable HC	G033T
QVQLKQSGPGLVQPSQSLSITCTVSGFSLTNYTVHWVRQSPGKGLEWLGVIWSGGNTDYNTPFTSRLSINKDNSKSQVFFKMNSLQSNDTAIYYCARALTYYDYEFAYWGQGTLVTVSA

SEQ ID NO: 151 - protein, 119 aa, Artificial Sequence
  Variable HC	G033Y
QVQLKQSGPGLVQPSQSLSITCTVSGFSLTNYYVHWVRQSPGKGLEWLGVIWSGGNTDYNTPFTSRLSINKDNSKSQVFFKMNSLQSNDTAIYYCARALTYYDYEFAYWGQGTLVTVSA

SEQ ID NO: 152 - protein, 119 aa, Artificial Sequence
  Variable HC	V034A
QVQLKQSGPGLVQPSQSLSITCTVSGFSLTNYGAHWVRQSPGKGLEWLGVIWSGGNTDYNTPFTSRLSINKDNSKSQVFFKMNSLQSNDTAIYYCARALTYYDYEFAYWGQGTLVTVSA

SEQ ID NO: 153 - protein, 119 aa, Artificial Sequence
  Variable HC	V034C
QVQLKQSGPGLVQPSQSLSITCTVSGFSLTNYGCHWVRQSPGKGLEWLGVIWSGGNTDYNTPFTSRLSINKDNSKSQVFFKMNSLQSNDTAIYYCARALTYYDYEFAYWGQGTLVTVSA

SEQ ID NO: 154 - protein, 119 aa, Artificial Sequence
  Variable HC	V034I
QVQLKQSGPGLVQPSQSLSITCTVSGFSLTNYGIHWVRQSPGKGLEWLGVIWSGGNTDYNTPFTSRLSINKDNSKSQVFFKMNSLQSNDTAIYYCARALTYYDYEFAYWGQGTLVTVSA

SEQ ID NO: 155 - protein, 119 aa, Artificial Sequence
  Variable HC	V034M
QVQLKQSGPGLVQPSQSLSITCTVSGFSLTNYGMHWVRQSPGKGLEWLGVIWSGGNTDYNTPFTSRLSINKDNSKSQVFFKMNSLQSNDTAIYYCARALTYYDYEFAYWGQGTLVTVSA

SEQ ID NO: 156 - protein, 119 aa, Artificial Sequence
  Variable HC	V034P
QVQLKQSGPGLVQPSQSLSITCTVSGFSLTNYGPHWVRQSPGKGLEWLGVIWSGGNTDYNTPFTSRLSINKDNSKSQVFFKMNSLQSNDTAIYYCARALTYYDYEFAYWGQGTLVTVSA

SEQ ID NO: 157 - protein, 119 aa, Artificial Sequence
  Variable HC	V034L
QVQLKQSGPGLVQPSQSLSITCTVSGFSLTNYGLHWVRQSPGKGLEWLGVIWSGGNTDYNTPFTSRLSINKDNSKSQVFFKMNSLQSNDTAIYYCARALTYYDYEFAYWGQGTLVTVSA

SEQ ID NO: 158 - protein, 119 aa, Artificial Sequence
  Variable HC	H035I
QVQLKQSGPGLVQPSQSLSITCTVSGFSLTNYGVIWVRQSPGKGLEWLGVIWSGGNTDYNTPFTSRLSINKDNSKSQVFFKMNSLQSNDTAIYYCARALTYYDYEFAYWGQGTLVTVSA

SEQ ID NO: 159 - protein, 119 aa, Artificial Sequence
  Variable HC	H035Q
QVQLKQSGPGLVQPSQSLSITCTVSGFSLTNYGVQWVRQSPGKGLEWLGVIWSGGNTDYNTPFTSRLSINKDNSKSQVFFKMNSLQSNDTAIYYCARALTYYDYEFAYWGQGTLVTVSA

SEQ ID NO: 160 - protein, 119 aa, Artificial Sequence
  Variable HC	W036K
QVQLKQSGPGLVQPSQSLSITCTVSGFSLTNYGVHKVRQSPGKGLEWLGVIWSGGNTDYNTPFTSRLSINKDNSKSQVFFKMNSLQSNDTAIYYCARALTYYDYEFAYWGQGTLVTVSA

SEQ ID NO: 161 - protein, 119 aa, Artificial Sequence
  Variable HC	W036A
QVQLKQSGPGLVQPSQSLSITCTVSGFSLTNYGVHAVRQSPGKGLEWLGVIWSGGNTDYNTPFTSRLSINKDNSKSQVFFKMNSLQSNDTAIYYCARALTYYDYEFAYWGQGTLVTVSA

SEQ ID NO: 162 - protein, 119 aa, Artificial Sequence
  Variable HC	W036I
QVQLKQSGPGLVQPSQSLSITCTVSGFSLTNYGVHIVRQSPGKGLEWLGVIWSGGNTDYNTPFTSRLSINKDNSKSQVFFKMNSLQSNDTAIYYCARALTYYDYEFAYWGQGTLVTVSA

SEQ ID NO: 163 - protein, 119 aa, Artificial Sequence
  Variable HC W036V
QVQLKQSGPGLVQPSQSLSITCTVSGFSLTNYGVHVVRQSPGKGLEWLGVIWSGGNTDYNTPFTSRLSINKDNSKSQVFFKMNSLQSNDTAIYYCARALTYYDYEFAYWGQGTLVTVSA

SEQ ID NO: 164 - protein, 119 aa, Artificial Sequence
  Variable HC	W036Y
QVQLKQSGPGLVQPSQSLSITCTVSGFSLTNYGVHYVRQSPGKGLEWLGVIWSGGNTDYNTPFTSRLSINKDNSKSQVFFKMNSLQSNDTAIYYCARALTYYDYEFAYWGQGTLVTVSA

SEQ ID NO: 165 - protein, 119 aa, Artificial Sequence
  Variable HC	V050K
QVQLKQSGPGLVQPSQSLSITCTVSGFSLTNYGVHWVRQSPGKGLEWLGKIWSGGNTDYNTPFTSRLSINKDNSKSQVFFKMNSLQSNDTAIYYCARALTYYDYEFAYWGQGTLVTVSA

SEQ ID NO: 166 - protein, 119 aa, Artificial Sequence
  Variable HC	V050H
QVQLKQSGPGLVQPSQSLSITCTVSGFSLTNYGVHWVRQSPGKGLEWLGHIWSGGNTDYNTPFTSRLSINKDNSKSQVFFKMNSLQSNDTAIYYCARALTYYDYEFAYWGQGTLVTVSA

SEQ ID NO: 167 - protein, 119 aa, Artificial Sequence
  Variable HC	V050A
QVQLKQSGPGLVQPSQSLSITCTVSGFSLTNYGVHWVRQSPGKGLEWLGAIWSGGNTDYNTPFTSRLSINKDNSKSQVFFKMNSLQSNDTAIYYCARALTYYDYEFAYWGQGTLVTVSA

SEQ ID NO: 168 - protein, 119 aa, Artificial Sequence
  Variable HC	V050D
QVQLKQSGPGLVQPSQSLSITCTVSGFSLTNYGVHWVRQSPGKGLEWLGDIWSGGNTDYNTPFTSRLSINKDNSKSQVFFKMNSLQSNDTAIYYCARALTYYDYEFAYWGQGTLVTVSA

SEQ ID NO: 169 - protein, 119 aa, Artificial Sequence
  Variable HC V050E
QVQLKQSGPGLVQPSQSLSITCTVSGFSLTNYGVHWVRQSPGKGLEWLGEIWSGGNTDYNTPFTSRLSINKDNSKSQVFFKMNSLQSNDTAIYYCARALTYYDYEFAYWGQGTLVTVSA

SEQ ID NO: 170 - protein, 119 aa, Artificial Sequence
  Variable HC	V050G
QVQLKQSGPGLVQPSQSLSITCTVSGFSLTNYGVHWVRQSPGKGLEWLGGIWSGGNTDYNTPFTSRLSINKDNSKSQVFFKMNSLQSNDTAIYYCARALTYYDYEFAYWGQGTLVTVSA

SEQ ID NO: 171 - protein, 119 aa, Artificial Sequence
  Variable HC	V050I
QVQLKQSGPGLVQPSQSLSITCTVSGFSLTNYGVHWVRQSPGKGLEWLGIIWSGGNTDYNTPFTSRLSINKDNSKSQVFFKMNSLQSNDTAIYYCARALTYYDYEFAYWGQGTLVTVSA

SEQ ID NO: 172 - protein, 119 aa, Artificial Sequence
  Variable HC	V050N
QVQLKQSGPGLVQPSQSLSITCTVSGFSLTNYGVHWVRQSPGKGLEWLGNIWSGGNTDYNTPFTSRLSINKDNSKSQVFFKMNSLQSNDTAIYYCARALTYYDYEFAYWGQGTLVTVSA

SEQ ID NO: 173 - protein, 119 aa, Artificial Sequence
  Variable HC	V050Q
QVQLKQSGPGLVQPSQSLSITCTVSGFSLTNYGVHWVRQSPGKGLEWLGQIWSGGNTDYNTPFTSRLSINKDNSKSQVFFKMNSLQSNDTAIYYCARALTYYDYEFAYWGQGTLVTVSA

SEQ ID NO: 174 - protein, 119 aa, Artificial Sequence
  Variable HC	V050T
QVQLKQSGPGLVQPSQSLSITCTVSGFSLTNYGVHWVRQSPGKGLEWLGTIWSGGNTDYNTPFTSRLSINKDNSKSQVFFKMNSLQSNDTAIYYCARALTYYDYEFAYWGQGTLVTVSA

SEQ ID NO: 175 - protein, 119 aa, Artificial Sequence
  Variable HC	V050L
QVQLKQSGPGLVQPSQSLSITCTVSGFSLTNYGVHWVRQSPGKGLEWLGLIWSGGNTDYNTPFTSRLSINKDNSKSQVFFKMNSLQSNDTAIYYCARALTYYDYEFAYWGQGTLVTVSA

SEQ ID NO: 176 - protein, 119 aa, Artificial Sequence
  Variable HC	I051K
QVQLKQSGPGLVQPSQSLSITCTVSGFSLTNYGVHWVRQSPGKGLEWLGVKWSGGNTDYNTPFTSRLSINKDNSKSQVFFKMNSLQSNDTAIYYCARALTYYDYEFAYWGQGTLVTVSA

SEQ ID NO: 177 - protein, 119 aa, Artificial Sequence
  Variable HC	I051H
QVQLKQSGPGLVQPSQSLSITCTVSGFSLTNYGVHWVRQSPGKGLEWLGVHWSGGNTDYNTPFTSRLSINKDNSKSQVFFKMNSLQSNDTAIYYCARALTYYDYEFAYWGQGTLVTVSA

SEQ ID NO: 178 - protein, 119 aa, Artificial Sequence
  Variable HC	I051A
QVQLKQSGPGLVQPSQSLSITCTVSGFSLTNYGVHWVRQSPGKGLEWLGVAWSGGNTDYNTPFTSRLSINKDNSKSQVFFKMNSLQSNDTAIYYCARALTYYDYEFAYWGQGTLVTVSA

SEQ ID NO: 179 - protein, 119 aa, Artificial Sequence
  Variable HC	I051C
QVQLKQSGPGLVQPSQSLSITCTVSGFSLTNYGVHWVRQSPGKGLEWLGVCWSGGNTDYNTPFTSRLSINKDNSKSQVFFKMNSLQSNDTAIYYCARALTYYDYEFAYWGQGTLVTVSA

SEQ ID NO: 180 - protein, 119 aa, Artificial Sequence
  Variable HC	I051E
QVQLKQSGPGLVQPSQSLSITCTVSGFSLTNYGVHWVRQSPGKGLEWLGVEWSGGNTDYNTPFTSRLSINKDNSKSQVFFKMNSLQSNDTAIYYCARALTYYDYEFAYWGQGTLVTVSA

SEQ ID NO: 181 - protein, 119 aa, Artificial Sequence
  Variable HC	I051G
QVQLKQSGPGLVQPSQSLSITCTVSGFSLTNYGVHWVRQSPGKGLEWLGVGWSGGNTDYNTPFTSRLSINKDNSKSQVFFKMNSLQSNDTAIYYCARALTYYDYEFAYWGQGTLVTVSA

SEQ ID NO: 182 - protein, 119 aa, Artificial Sequence
  Variable HC	I051N
QVQLKQSGPGLVQPSQSLSITCTVSGFSLTNYGVHWVRQSPGKGLEWLGVNWSGGNTDYNTPFTSRLSINKDNSKSQVFFKMNSLQSNDTAIYYCARALTYYDYEFAYWGQGTLVTVSA

SEQ ID NO: 183 - protein, 119 aa, Artificial Sequence
  Variable HC	I051Q
QVQLKQSGPGLVQPSQSLSITCTVSGFSLTNYGVHWVRQSPGKGLEWLGVQWSGGNTDYNTPFTSRLSINKDNSKSQVFFKMNSLQSNDTAIYYCARALTYYDYEFAYWGQGTLVTVSA

SEQ ID NO: 184 - protein, 119 aa, Artificial Sequence
  Variable HC	I051S
QVQLKQSGPGLVQPSQSLSITCTVSGFSLTNYGVHWVRQSPGKGLEWLGVSWSGGNTDYNTPFTSRLSINKDNSKSQVFFKMNSLQSNDTAIYYCARALTYYDYEFAYWGQGTLVTVSA

SEQ ID NO: 185 - protein, 119 aa, Artificial Sequence
  Variable HC	I051V
QVQLKQSGPGLVQPSQSLSITCTVSGFSLTNYGVHWVRQSPGKGLEWLGVVWSGGNTDYNTPFTSRLSINKDNSKSQVFFKMNSLQSNDTAIYYCARALTYYDYEFAYWGQGTLVTVSA

SEQ ID NO: 186 - protein, 119 aa, Artificial Sequence
  Variable HC	I051Y
QVQLKQSGPGLVQPSQSLSITCTVSGFSLTNYGVHWVRQSPGKGLEWLGVYWSGGNTDYNTPFTSRLSINKDNSKSQVFFKMNSLQSNDTAIYYCARALTYYDYEFAYWGQGTLVTVSA

SEQ ID NO: 187 - protein, 119 aa, Artificial Sequence
  Variable HC	I051L
QVQLKQSGPGLVQPSQSLSITCTVSGFSLTNYGVHWVRQSPGKGLEWLGVLWSGGNTDYNTPFTSRLSINKDNSKSQVFFKMNSLQSNDTAIYYCARALTYYDYEFAYWGQGTLVTVSA

SEQ ID NO: 188 - protein, 119 aa, Artificial Sequence
  Variable HC	W052I
QVQLKQSGPGLVQPSQSLSITCTVSGFSLTNYGVHWVRQSPGKGLEWLGVIISGGNTDYNTPFTSRLSINKDNSKSQVFFKMNSLQSNDTAIYYCARALTYYDYEFAYWGQGTLVTVSA

SEQ ID NO: 189 - protein, 119 aa, Artificial Sequence
  Variable HC	W052N
QVQLKQSGPGLVQPSQSLSITCTVSGFSLTNYGVHWVRQSPGKGLEWLGVINSGGNTDYNTPFTSRLSINKDNSKSQVFFKMNSLQSNDTAIYYCARALTYYDYEFAYWGQGTLVTVSA

SEQ ID NO: 190 - protein, 119 aa, Artificial Sequence
  Variable HC	W052Y
QVQLKQSGPGLVQPSQSLSITCTVSGFSLTNYGVHWVRQSPGKGLEWLGVIYSGGNTDYNTPFTSRLSINKDNSKSQVFFKMNSLQSNDTAIYYCARALTYYDYEFAYWGQGTLVTVSA

SEQ ID NO: 191 - protein, 119 aa, Artificial Sequence
  Variable HC	S053H
QVQLKQSGPGLVQPSQSLSITCTVSGFSLTNYGVHWVRQSPGKGLEWLGVIWHGGNTDYNTPFTSRLSINKDNSKSQVFFKMNSLQSNDTAIYYCARALTYYDYEFAYWGQGTLVTVSA

SEQ ID NO: 192 - protein, 119 aa, Artificial Sequence
  Variable HC	S053R
QVQLKQSGPGLVQPSQSLSITCTVSGFSLTNYGVHWVRQSPGKGLEWLGVIWRGGNTDYNTPFTSRLSINKDNSKSQVFFKMNSLQSNDTAIYYCARALTYYDYEFAYWGQGTLVTVSA

SEQ ID NO: 193 - protein, 119 aa, Artificial Sequence
  Variable HC	S053A
QVQLKQSGPGLVQPSQSLSITCTVSGFSLTNYGVHWVRQSPGKGLEWLGVIWAGGNTDYNTPFTSRLSINKDNSKSQVFFKMNSLQSNDTAIYYCARALTYYDYEFAYWGQGTLVTVSA

SEQ ID NO: 194 - protein, 119 aa, Artificial Sequence
  Variable HC S053C
QVQLKQSGPGLVQPSQSLSITCTVSGFSLTNYGVHWVRQSPGKGLEWLGVIWCGGNTDYNTPFTSRLSINKDNSKSQVFFKMNSLQSNDTAIYYCARALTYYDYEFAYWGQGTLVTVSA

SEQ ID NO: 195 - protein, 119 aa, Artificial Sequence
  Variable HC	S053G
QVQLKQSGPGLVQPSQSLSITCTVSGFSLTNYGVHWVRQSPGKGLEWLGVIWGGGNTDYNTPFTSRLSINKDNSKSQVFFKMNSLQSNDTAIYYCARALTYYDYEFAYWGQGTLVTVSA

SEQ ID NO: 196 - protein, 119 aa, Artificial Sequence
  Variable HC	S053I
QVQLKQSGPGLVQPSQSLSITCTVSGFSLTNYGVHWVRQSPGKGLEWLGVIWIGGNTDYNTPFTSRLSINKDNSKSQVFFKMNSLQSNDTAIYYCARALTYYDYEFAYWGQGTLVTVSA

SEQ ID NO: 197 - protein, 119 aa, Artificial Sequence
  Variable HC	S053M
QVQLKQSGPGLVQPSQSLSITCTVSGFSLTNYGVHWVRQSPGKGLEWLGVIWMGGNTDYNTPFTSRLSINKDNSKSQVFFKMNSLQSNDTAIYYCARALTYYDYEFAYWGQGTLVTVSA

SEQ ID NO: 198 - protein, 119 aa, Artificial Sequence
  Variable HC	S053P
QVQLKQSGPGLVQPSQSLSITCTVSGFSLTNYGVHWVRQSPGKGLEWLGVIWPGGNTDYNTPFTSRLSINKDNSKSQVFFKMNSLQSNDTAIYYCARALTYYDYEFAYWGQGTLVTVSA

SEQ ID NO: 199 - protein, 119 aa, Artificial Sequence
  Variable HC	S053Q
QVQLKQSGPGLVQPSQSLSITCTVSGFSLTNYGVHWVRQSPGKGLEWLGVIWQGGNTDYNTPFTSRLSINKDNSKSQVFFKMNSLQSNDTAIYYCARALTYYDYEFAYWGQGTLVTVSA

SEQ ID NO: 200 - protein, 119 aa, Artificial Sequence
  Variable HC	S053L
QVQLKQSGPGLVQPSQSLSITCTVSGFSLTNYGVHWVRQSPGKGLEWLGVIWLGGNTDYNTPFTSRLSINKDNSKSQVFFKMNSLQSNDTAIYYCARALTYYDYEFAYWGQGTLVTVSA

SEQ ID NO: 201 - protein, 119 aa, Artificial Sequence
  Variable HC	S053T
QVQLKQSGPGLVQPSQSLSITCTVSGFSLTNYGVHWVRQSPGKGLEWLGVIWTGGNTDYNTPFTSRLSINKDNSKSQVFFKMNSLQSNDTAIYYCARALTYYDYEFAYWGQGTLVTVSA

SEQ ID NO: 202 - protein, 119 aa, Artificial Sequence
  Variable HC	S053V
QVQLKQSGPGLVQPSQSLSITCTVSGFSLTNYGVHWVRQSPGKGLEWLGVIWVGGNTDYNTPFTSRLSINKDNSKSQVFFKMNSLQSNDTAIYYCARALTYYDYEFAYWGQGTLVTVSA

SEQ ID NO: 203 - protein, 119 aa, Artificial Sequence
  Variable HC	S053Y
QVQLKQSGPGLVQPSQSLSITCTVSGFSLTNYGVHWVRQSPGKGLEWLGVIWYGGNTDYNTPFTSRLSINKDNSKSQVFFKMNSLQSNDTAIYYCARALTYYDYEFAYWGQGTLVTVSA

SEQ ID NO: 204 - protein, 119 aa, Artificial Sequence
  Variable HC	G054H
QVQLKQSGPGLVQPSQSLSITCTVSGFSLTNYGVHWVRQSPGKGLEWLGVIWSHGNTDYNTPFTSRLSINKDNSKSQVFFKMNSLQSNDTAIYYCARALTYYDYEFAYWGQGTLVTVSA

SEQ ID NO: 205 - protein, 119 aa, Artificial Sequence
  Variable HC	G054R
QVQLKQSGPGLVQPSQSLSITCTVSGFSLTNYGVHWVRQSPGKGLEWLGVIWSRGNTDYNTPFTSRLSINKDNSKSQVFFKMNSLQSNDTAIYYCARALTYYDYEFAYWGQGTLVTVSA

SEQ ID NO: 206 - protein, 119 aa, Artificial Sequence
  Variable HC	G054A
QVQLKQSGPGLVQPSQSLSITCTVSGFSLTNYGVHWVRQSPGKGLEWLGVIWSAGNTDYNTPFTSRLSINKDNSKSQVFFKMNSLQSNDTAIYYCARALTYYDYEFAYWGQGTLVTVSA

SEQ ID NO: 207 - protein, 119 aa, Artificial Sequence
  Variable HC	G054C
QVQLKQSGPGLVQPSQSLSITCTVSGFSLTNYGVHWVRQSPGKGLEWLGVIWSCGNTDYNTPFTSRLSINKDNSKSQVFFKMNSLQSNDTAIYYCARALTYYDYEFAYWGQGTLVTVSA

SEQ ID NO: 208 - protein, 119 aa, Artificial Sequence
  Variable HC	G054D
QVQLKQSGPGLVQPSQSLSITCTVSGFSLTNYGVHWVRQSPGKGLEWLGVIWSDGNTDYNTPFTSRLSINKDNSKSQVFFKMNSLQSNDTAIYYCARALTYYDYEFAYWGQGTLVTVSA

SEQ ID NO: 209 - protein, 119 aa, Artificial Sequence
  Variable HC	G054P
QVQLKQSGPGLVQPSQSLSITCTVSGFSLTNYGVHWVRQSPGKGLEWLGVIWSPGNTDYNTPFTSRLSINKDNSKSQVFFKMNSLQSNDTAIYYCARALTYYDYEFAYWGQGTLVTVSA

SEQ ID NO: 210 - protein, 119 aa, Artificial Sequence
  Variable HC	G054S
QVQLKQSGPGLVQPSQSLSITCTVSGFSLTNYGVHWVRQSPGKGLEWLGVIWSSGNTDYNTPFTSRLSINKDNSKSQVFFKMNSLQSNDTAIYYCARALTYYDYEFAYWGQGTLVTVSA

SEQ ID NO: 211 - protein, 119 aa, Artificial Sequence
  Variable HC	G055H
QVQLKQSGPGLVQPSQSLSITCTVSGFSLTNYGVHWVRQSPGKGLEWLGVIWSGHNTDYNTPFTSRLSINKDNSKSQVFFKMNSLQSNDTAIYYCARALTYYDYEFAYWGQGTLVTVSA

SEQ ID NO: 212 - protein, 119 aa, Artificial Sequence
  Variable HC	G055R
QVQLKQSGPGLVQPSQSLSITCTVSGFSLTNYGVHWVRQSPGKGLEWLGVIWSGRNTDYNTPFTSRLSINKDNSKSQVFFKMNSLQSNDTAIYYCARALTYYDYEFAYWGQGTLVTVSA

SEQ ID NO: 213 - protein, 119 aa, Artificial Sequence
  Variable HC	G055M
QVQLKQSGPGLVQPSQSLSITCTVSGFSLTNYGVHWVRQSPGKGLEWLGVIWSGMNTDYNTPFTSRLSINKDNSKSQVFFKMNSLQSNDTAIYYCARALTYYDYEFAYWGQGTLVTVSA

SEQ ID NO: 214 - protein, 119 aa, Artificial Sequence
  Variable HC	G055S
QVQLKQSGPGLVQPSQSLSITCTVSGFSLTNYGVHWVRQSPGKGLEWLGVIWSGSNTDYNTPFTSRLSINKDNSKSQVFFKMNSLQSNDTAIYYCARALTYYDYEFAYWGQGTLVTVSA

SEQ ID NO: 215 - protein, 119 aa, Artificial Sequence
  Variable HC	G055Y
QVQLKQSGPGLVQPSQSLSITCTVSGFSLTNYGVHWVRQSPGKGLEWLGVIWSGYNTDYNTPFTSRLSINKDNSKSQVFFKMNSLQSNDTAIYYCARALTYYDYEFAYWGQGTLVTVSA

SEQ ID NO: 216 - protein, 119 aa, Artificial Sequence
  Variable HC	N056K
QVQLKQSGPGLVQPSQSLSITCTVSGFSLTNYGVHWVRQSPGKGLEWLGVIWSGGKTDYNTPFTSRLSINKDNSKSQVFFKMNSLQSNDTAIYYCARALTYYDYEFAYWGQGTLVTVSA

SEQ ID NO: 217 - protein, 119 aa, Artificial Sequence
  Variable HC	N056A
QVQLKQSGPGLVQPSQSLSITCTVSGFSLTNYGVHWVRQSPGKGLEWLGVIWSGGATDYNTPFTSRLSINKDNSKSQVFFKMNSLQSNDTAIYYCARALTYYDYEFAYWGQGTLVTVSA

SEQ ID NO: 218 - protein, 119 aa, Artificial Sequence
  Variable HC	N056P
QVQLKQSGPGLVQPSQSLSITCTVSGFSLTNYGVHWVRQSPGKGLEWLGVIWSGGPTDYNTPFTSRLSINKDNSKSQVFFKMNSLQSNDTAIYYCARALTYYDYEFAYWGQGTLVTVSA

SEQ ID NO: 219 - protein, 119 aa, Artificial Sequence
  Variable HC	N056S
QVQLKQSGPGLVQPSQSLSITCTVSGFSLTNYGVHWVRQSPGKGLEWLGVIWSGGSTDYNTPFTSRLSINKDNSKSQVFFKMNSLQSNDTAIYYCARALTYYDYEFAYWGQGTLVTVSA

SEQ ID NO: 220 - protein, 119 aa, Artificial Sequence
  Variable HC	N056V
QVQLKQSGPGLVQPSQSLSITCTVSGFSLTNYGVHWVRQSPGKGLEWLGVIWSGGVTDYNTPFTSRLSINKDNSKSQVFFKMNSLQSNDTAIYYCARALTYYDYEFAYWGQGTLVTVSA

SEQ ID NO: 221 - protein, 119 aa, Artificial Sequence
  Variable HC	N056G
QVQLKQSGPGLVQPSQSLSITCTVSGFSLTNYGVHWVRQSPGKGLEWLGVIWSGGGTDYNTPFTSRLSINKDNSKSQVFFKMNSLQSNDTAIYYCARALTYYDYEFAYWGQGTLVTVSA

SEQ ID NO: 222 - protein, 119 aa, Artificial Sequence
  Variable HC	T057H
QVQLKQSGPGLVQPSQSLSITCTVSGFSLTNYGVHWVRQSPGKGLEWLGVIWSGGNHDYNTPFTSRLSINKDNSKSQVFFKMNSLQSNDTAIYYCARALTYYDYEFAYWGQGTLVTVSA

SEQ ID NO: 223 - protein, 119 aa, Artificial Sequence
  Variable HC	T057R
QVQLKQSGPGLVQPSQSLSITCTVSGFSLTNYGVHWVRQSPGKGLEWLGVIWSGGNRDYNTPFTSRLSINKDNSKSQVFFKMNSLQSNDTAIYYCARALTYYDYEFAYWGQGTLVTVSA

SEQ ID NO: 224 - protein, 119 aa, Artificial Sequence
  Variable HC	T057L
QVQLKQSGPGLVQPSQSLSITCTVSGFSLTNYGVHWVRQSPGKGLEWLGVIWSGGNLDYNTPFTSRLSINKDNSKSQVFFKMNSLQSNDTAIYYCARALTYYDYEFAYWGQGTLVTVSA

SEQ ID NO: 225 - protein, 119 aa, Artificial Sequence
  Variable HC	T057A
QVQLKQSGPGLVQPSQSLSITCTVSGFSLTNYGVHWVRQSPGKGLEWLGVIWSGGNADYNTPFTSRLSINKDNSKSQVFFKMNSLQSNDTAIYYCARALTYYDYEFAYWGQGTLVTVSA

SEQ ID NO: 226 - protein, 119 aa, Artificial Sequence
  Variable HC	T057C
QVQLKQSGPGLVQPSQSLSITCTVSGFSLTNYGVHWVRQSPGKGLEWLGVIWSGGNCDYNTPFTSRLSINKDNSKSQVFFKMNSLQSNDTAIYYCARALTYYDYEFAYWGQGTLVTVSA

SEQ ID NO: 227 - protein, 119 aa, Artificial Sequence
  Variable HC	T057D
QVQLKQSGPGLVQPSQSLSITCTVSGFSLTNYGVHWVRQSPGKGLEWLGVIWSGGNDDYNTPFTSRLSINKDNSKSQVFFKMNSLQSNDTAIYYCARALTYYDYEFAYWGQGTLVTVSA

SEQ ID NO: 228 - protein, 119 aa, Artificial Sequence
  Variable HC	T057F
QVQLKQSGPGLVQPSQSLSITCTVSGFSLTNYGVHWVRQSPGKGLEWLGVIWSGGNFDYNTPFTSRLSINKDNSKSQVFFKMNSLQSNDTAIYYCARALTYYDYEFAYWGQGTLVTVSA

SEQ ID NO: 229 - protein, 119 aa, Artificial Sequence
  Variable HC	T057M
QVQLKQSGPGLVQPSQSLSITCTVSGFSLTNYGVHWVRQSPGKGLEWLGVIWSGGNMDYNTPFTSRLSINKDNSKSQVFFKMNSLQSNDTAIYYCARALTYYDYEFAYWGQGTLVTVSA

SEQ ID NO: 230 - protein, 119 aa, Artificial Sequence
  Variable HC	T057N
QVQLKQSGPGLVQPSQSLSITCTVSGFSLTNYGVHWVRQSPGKGLEWLGVIWSGGNNDYNTPFTSRLSINKDNSKSQVFFKMNSLQSNDTAIYYCARALTYYDYEFAYWGQGTLVTVSA

SEQ ID NO: 231 - protein, 119 aa, Artificial Sequence
  Variable HC	T057Q
QVQLKQSGPGLVQPSQSLSITCTVSGFSLTNYGVHWVRQSPGKGLEWLGVIWSGGNQDYNTPFTSRLSINKDNSKSQVFFKMNSLQSNDTAIYYCARALTYYDYEFAYWGQGTLVTVSA

SEQ ID NO: 232 - protein, 119 aa, Artificial Sequence
  Variable HC	T057W
QVQLKQSGPGLVQPSQSLSITCTVSGFSLTNYGVHWVRQSPGKGLEWLGVIWSGGNWDYNTPFTSRLSINKDNSKSQVFFKMNSLQSNDTAIYYCARALTYYDYEFAYWGQGTLVTVSA

SEQ ID NO: 233 - protein, 119 aa, Artificial Sequence
  Variable HC	T057Y
QVQLKQSGPGLVQPSQSLSITCTVSGFSLTNYGVHWVRQSPGKGLEWLGVIWSGGNYDYNTPFTSRLSINKDNSKSQVFFKMNSLQSNDTAIYYCARALTYYDYEFAYWGQGTLVTVSA

SEQ ID NO: 234 - protein, 119 aa, Artificial Sequence
  Variable HC	D058L
QVQLKQSGPGLVQPSQSLSITCTVSGFSLTNYGVHWVRQSPGKGLEWLGVIWSGGNTLYNTPFTSRLSINKDNSKSQVFFKMNSLQSNDTAIYYCARALTYYDYEFAYWGQGTLVTVSA

SEQ ID NO: 235 - protein, 119 aa, Artificial Sequence
  Variable HC	D058G
QVQLKQSGPGLVQPSQSLSITCTVSGFSLTNYGVHWVRQSPGKGLEWLGVIWSGGNTGYNTPFTSRLSINKDNSKSQVFFKMNSLQSNDTAIYYCARALTYYDYEFAYWGQGTLVTVSA

SEQ ID NO: 236 - protein, 119 aa, Artificial Sequence
  Variable HC	D058M
QVQLKQSGPGLVQPSQSLSITCTVSGFSLTNYGVHWVRQSPGKGLEWLGVIWSGGNTMYNTPFTSRLSINKDNSKSQVFFKMNSLQSNDTAIYYCARALTYYDYEFAYWGQGTLVTVSA

SEQ ID NO: 237 - protein, 119 aa, Artificial Sequence
  Variable HC	D058N
QVQLKQSGPGLVQPSQSLSITCTVSGFSLTNYGVHWVRQSPGKGLEWLGVIWSGGNTNYNTPFTSRLSINKDNSKSQVFFKMNSLQSNDTAIYYCARALTYYDYEFAYWGQGTLVTVSA

SEQ ID NO: 238 - protein, 119 aa, Artificial Sequence
  Variable HC	D058Q
QVQLKQSGPGLVQPSQSLSITCTVSGFSLTNYGVHWVRQSPGKGLEWLGVIWSGGNTQYNTPFTSRLSINKDNSKSQVFFKMNSLQSNDTAIYYCARALTYYDYEFAYWGQGTLVTVSA

SEQ ID NO: 239 - protein, 119 aa, Artificial Sequence
  Variable HC	Y059H
QVQLKQSGPGLVQPSQSLSITCTVSGFSLTNYGVHWVRQSPGKGLEWLGVIWSGGNTDHNTPFTSRLSINKDNSKSQVFFKMNSLQSNDTAIYYCARALTYYDYEFAYWGQGTLVTVSA

SEQ ID NO: 240 - protein, 119 aa, Artificial Sequence
  Variable HC	Y059R
QVQLKQSGPGLVQPSQSLSITCTVSGFSLTNYGVHWVRQSPGKGLEWLGVIWSGGNTDRNTPFTSRLSINKDNSKSQVFFKMNSLQSNDTAIYYCARALTYYDYEFAYWGQGTLVTVSA

SEQ ID NO: 241 - protein, 119 aa, Artificial Sequence
  Variable HC	Y059A
QVQLKQSGPGLVQPSQSLSITCTVSGFSLTNYGVHWVRQSPGKGLEWLGVIWSGGNTDANTPFTSRLSINKDNSKSQVFFKMNSLQSNDTAIYYCARALTYYDYEFAYWGQGTLVTVSA

SEQ ID NO: 242 - protein, 119 aa, Artificial Sequence
  Variable HC	Y059C
QVQLKQSGPGLVQPSQSLSITCTVSGFSLTNYGVHWVRQSPGKGLEWLGVIWSGGNTDCNTPFTSRLSINKDNSKSQVFFKMNSLQSNDTAIYYCARALTYYDYEFAYWGQGTLVTVSA

SEQ ID NO: 243 - protein, 119 aa, Artificial Sequence
  Variable HC	Y059D
QVQLKQSGPGLVQPSQSLSITCTVSGFSLTNYGVHWVRQSPGKGLEWLGVIWSGGNTDDNTPFTSRLSINKDNSKSQVFFKMNSLQSNDTAIYYCARALTYYDYEFAYWGQGTLVTVSA

SEQ ID NO: 244 - protein, 119 aa, Artificial Sequence
  Variable HC	Y059E
QVQLKQSGPGLVQPSQSLSITCTVSGFSLTNYGVHWVRQSPGKGLEWLGVIWSGGNTDENTPFTSRLSINKDNSKSQVFFKMNSLQSNDTAIYYCARALTYYDYEFAYWGQGTLVTVSA

SEQ ID NO: 245 - protein, 119 aa, Artificial Sequence
  Variable HC	Y059G
QVQLKQSGPGLVQPSQSLSITCTVSGFSLTNYGVHWVRQSPGKGLEWLGVIWSGGNTDGNTPFTSRLSINKDNSKSQVFFKMNSLQSNDTAIYYCARALTYYDYEFAYWGQGTLVTVSA

SEQ ID NO: 246 - protein, 119 aa, Artificial Sequence
  Variable HC	Y059I
QVQLKQSGPGLVQPSQSLSITCTVSGFSLTNYGVHWVRQSPGKGLEWLGVIWSGGNTDINTPFTSRLSINKDNSKSQVFFKMNSLQSNDTAIYYCARALTYYDYEFAYWGQGTLVTVSA

SEQ ID NO: 247 - protein, 119 aa, Artificial Sequence
  Variable HC	Y059P
QVQLKQSGPGLVQPSQSLSITCTVSGFSLTNYGVHWVRQSPGKGLEWLGVIWSGGNTDPNTPFTSRLSINKDNSKSQVFFKMNSLQSNDTAIYYCARALTYYDYEFAYWGQGTLVTVSA

SEQ ID NO: 248 - protein, 119 aa, Artificial Sequence
  Variable HC	Y059Q
QVQLKQSGPGLVQPSQSLSITCTVSGFSLTNYGVHWVRQSPGKGLEWLGVIWSGGNTDQNTPFTSRLSINKDNSKSQVFFKMNSLQSNDTAIYYCARALTYYDYEFAYWGQGTLVTVSA

SEQ ID NO: 249 - protein, 119 aa, Artificial Sequence
  Variable HC	Y059S
QVQLKQSGPGLVQPSQSLSITCTVSGFSLTNYGVHWVRQSPGKGLEWLGVIWSGGNTDSNTPFTSRLSINKDNSKSQVFFKMNSLQSNDTAIYYCARALTYYDYEFAYWGQGTLVTVSA

SEQ ID NO: 250 - protein, 119 aa, Artificial Sequence
  Variable HC	Y059T
QVQLKQSGPGLVQPSQSLSITCTVSGFSLTNYGVHWVRQSPGKGLEWLGVIWSGGNTDTNTPFTSRLSINKDNSKSQVFFKMNSLQSNDTAIYYCARALTYYDYEFAYWGQGTLVTVSA

SEQ ID NO: 251 - protein, 119 aa, Artificial Sequence
  Variable HC	Y059V
QVQLKQSGPGLVQPSQSLSITCTVSGFSLTNYGVHWVRQSPGKGLEWLGVIWSGGNTDVNTPFTSRLSINKDNSKSQVFFKMNSLQSNDTAIYYCARALTYYDYEFAYWGQGTLVTVSA

SEQ ID NO: 252 - protein, 119 aa, Artificial Sequence
  Variable HC	Y059W
QVQLKQSGPGLVQPSQSLSITCTVSGFSLTNYGVHWVRQSPGKGLEWLGVIWSGGNTDWNTPFTSRLSINKDNSKSQVFFKMNSLQSNDTAIYYCARALTYYDYEFAYWGQGTLVTVSA

SEQ ID NO: 253 - protein, 119 aa, Artificial Sequence
  Variable HC	N060K
QVQLKQSGPGLVQPSQSLSITCTVSGFSLTNYGVHWVRQSPGKGLEWLGVIWSGGNTDYKTPFTSRLSINKDNSKSQVFFKMNSLQSNDTAIYYCARALTYYDYEFAYWGQGTLVTVSA

SEQ ID NO: 254 - protein, 119 aa, Artificial Sequence
  Variable HC	N060A
QVQLKQSGPGLVQPSQSLSITCTVSGFSLTNYGVHWVRQSPGKGLEWLGVIWSGGNTDYATPFTSRLSINKDNSKSQVFFKMNSLQSNDTAIYYCARALTYYDYEFAYWGQGTLVTVSA

SEQ ID NO: 255 - protein, 119 aa, Artificial Sequence
  Variable HC	N060C
QVQLKQSGPGLVQPSQSLSITCTVSGFSLTNYGVHWVRQSPGKGLEWLGVIWSGGNTDYCTPFTSRLSINKDNSKSQVFFKMNSLQSNDTAIYYCARALTYYDYEFAYWGQGTLVTVSA

SEQ ID NO: 256 - protein, 119 aa, Artificial Sequence
  Variable HC	N060D
QVQLKQSGPGLVQPSQSLSITCTVSGFSLTNYGVHWVRQSPGKGLEWLGVIWSGGNTDYDTPFTSRLSINKDNSKSQVFFKMNSLQSNDTAIYYCARALTYYDYEFAYWGQGTLVTVSA

SEQ ID NO: 257 - protein, 119 aa, Artificial Sequence
  Variable HC	N060F
QVQLKQSGPGLVQPSQSLSITCTVSGFSLTNYGVHWVRQSPGKGLEWLGVIWSGGNTDYFTPFTSRLSINKDNSKSQVFFKMNSLQSNDTAIYYCARALTYYDYEFAYWGQGTLVTVSA

SEQ ID NO: 258 - protein, 119 aa, Artificial Sequence
  Variable HC	N060G
QVQLKQSGPGLVQPSQSLSITCTVSGFSLTNYGVHWVRQSPGKGLEWLGVIWSGGNTDYGTPFTSRLSINKDNSKSQVFFKMNSLQSNDTAIYYCARALTYYDYEFAYWGQGTLVTVSA

SEQ ID NO: 259 - protein, 119 aa, Artificial Sequence
  Variable HC	N060P
QVQLKQSGPGLVQPSQSLSITCTVSGFSLTNYGVHWVRQSPGKGLEWLGVIWSGGNTDYPTPFTSRLSINKDNSKSQVFFKMNSLQSNDTAIYYCARALTYYDYEFAYWGQGTLVTVSA

SEQ ID NO: 260 - protein, 119 aa, Artificial Sequence
  Variable HC	N060Q
QVQLKQSGPGLVQPSQSLSITCTVSGFSLTNYGVHWVRQSPGKGLEWLGVIWSGGNTDYQTPFTSRLSINKDNSKSQVFFKMNSLQSNDTAIYYCARALTYYDYEFAYWGQGTLVTVSA

SEQ ID NO: 261 - protein, 119 aa, Artificial Sequence
  Variable HC	N060S
QVQLKQSGPGLVQPSQSLSITCTVSGFSLTNYGVHWVRQSPGKGLEWLGVIWSGGNTDYSTPFTSRLSINKDNSKSQVFFKMNSLQSNDTAIYYCARALTYYDYEFAYWGQGTLVTVSA

SEQ ID NO: 262 - protein, 119 aa, Artificial Sequence
  Variable HC	N060T
QVQLKQSGPGLVQPSQSLSITCTVSGFSLTNYGVHWVRQSPGKGLEWLGVIWSGGNTDYTTPFTSRLSINKDNSKSQVFFKMNSLQSNDTAIYYCARALTYYDYEFAYWGQGTLVTVSA

SEQ ID NO: 263 - protein, 119 aa, Artificial Sequence
  Variable HC	N060Y
QVQLKQSGPGLVQPSQSLSITCTVSGFSLTNYGVHWVRQSPGKGLEWLGVIWSGGNTDYYTPFTSRLSINKDNSKSQVFFKMNSLQSNDTAIYYCARALTYYDYEFAYWGQGTLVTVSA

SEQ ID NO: 264 - protein, 119 aa, Artificial Sequence
  Variable HC	T061N
QVQLKQSGPGLVQPSQSLSITCTVSGFSLTNYGVHWVRQSPGKGLEWLGVIWSGGNTDYNNPFTSRLSINKDNSKSQVFFKMNSLQSNDTAIYYCARALTYYDYEFAYWGQGTLVTVSA

SEQ ID NO: 265 - protein, 119 aa, Artificial Sequence
  Variable HC	T061Q
QVQLKQSGPGLVQPSQSLSITCTVSGFSLTNYGVHWVRQSPGKGLEWLGVIWSGGNTDYNQPFTSRLSINKDNSKSQVFFKMNSLQSNDTAIYYCARALTYYDYEFAYWGQGTLVTVSA

SEQ ID NO: 266 - protein, 119 aa, Artificial Sequence
  Variable HC	P062G
QVQLKQSGPGLVQPSQSLSITCTVSGFSLTNYGVHWVRQSPGKGLEWLGVIWSGGNTDYNTGFTSRLSINKDNSKSQVFFKMNSLQSNDTAIYYCARALTYYDYEFAYWGQGTLVTVSA

SEQ ID NO: 267 - protein, 119 aa, Artificial Sequence
  Variable HC	F063H
QVQLKQSGPGLVQPSQSLSITCTVSGFSLTNYGVHWVRQSPGKGLEWLGVIWSGGNTDYNTPHTSRLSINKDNSKSQVFFKMNSLQSNDTAIYYCARALTYYDYEFAYWGQGTLVTVSA

SEQ ID NO: 268 - protein, 119 aa, Artificial Sequence
  Variable HC	F063R
QVQLKQSGPGLVQPSQSLSITCTVSGFSLTNYGVHWVRQSPGKGLEWLGVIWSGGNTDYNTPRTSRLSINKDNSKSQVFFKMNSLQSNDTAIYYCARALTYYDYEFAYWGQGTLVTVSA

SEQ ID NO: 269 - protein, 119 aa, Artificial Sequence
  Variable HC	F063L
QVQLKQSGPGLVQPSQSLSITCTVSGFSLTNYGVHWVRQSPGKGLEWLGVIWSGGNTDYNTPLTSRLSINKDNSKSQVFFKMNSLQSNDTAIYYCARALTYYDYEFAYWGQGTLVTVSA

SEQ ID NO: 270 - protein, 119 aa, Artificial Sequence
  Variable HC	F063A
QVQLKQSGPGLVQPSQSLSITCTVSGFSLTNYGVHWVRQSPGKGLEWLGVIWSGGNTDYNTPATSRLSINKDNSKSQVFFKMNSLQSNDTAIYYCARALTYYDYEFAYWGQGTLVTVSA

SEQ ID NO: 271 - protein, 119 aa, Artificial Sequence
  Variable HC	F063C
QVQLKQSGPGLVQPSQSLSITCTVSGFSLTNYGVHWVRQSPGKGLEWLGVIWSGGNTDYNTPCTSRLSINKDNSKSQVFFKMNSLQSNDTAIYYCARALTYYDYEFAYWGQGTLVTVSA

SEQ ID NO: 272 - protein, 119 aa, Artificial Sequence
  Variable HC	F063D
QVQLKQSGPGLVQPSQSLSITCTVSGFSLTNYGVHWVRQSPGKGLEWLGVIWSGGNTDYNTPDTSRLSINKDNSKSQVFFKMNSLQSNDTAIYYCARALTYYDYEFAYWGQGTLVTVSA

SEQ ID NO: 273 - protein, 119 aa, Artificial Sequence
  Variable HC	F063G
QVQLKQSGPGLVQPSQSLSITCTVSGFSLTNYGVHWVRQSPGKGLEWLGVIWSGGNTDYNTPGTSRLSINKDNSKSQVFFKMNSLQSNDTAIYYCARALTYYDYEFAYWGQGTLVTVSA

SEQ ID NO: 274 - protein, 119 aa, Artificial Sequence
  Variable HC	F063M
QVQLKQSGPGLVQPSQSLSITCTVSGFSLTNYGVHWVRQSPGKGLEWLGVIWSGGNTDYNTPMTSRLSINKDNSKSQVFFKMNSLQSNDTAIYYCARALTYYDYEFAYWGQGTLVTVSA

SEQ ID NO: 275 - protein, 119 aa, Artificial Sequence
  Variable HC	F063N
QVQLKQSGPGLVQPSQSLSITCTVSGFSLTNYGVHWVRQSPGKGLEWLGVIWSGGNTDYNTPNTSRLSINKDNSKSQVFFKMNSLQSNDTAIYYCARALTYYDYEFAYWGQGTLVTVSA

SEQ ID NO: 276 - protein, 119 aa, Artificial Sequence
  Variable HC	F063Q
QVQLKQSGPGLVQPSQSLSITCTVSGFSLTNYGVHWVRQSPGKGLEWLGVIWSGGNTDYNTPQTSRLSINKDNSKSQVFFKMNSLQSNDTAIYYCARALTYYDYEFAYWGQGTLVTVSA

SEQ ID NO: 277 - protein, 119 aa, Artificial Sequence
  Variable HC	F063S
QVQLKQSGPGLVQPSQSLSITCTVSGFSLTNYGVHWVRQSPGKGLEWLGVIWSGGNTDYNTPSTSRLSINKDNSKSQVFFKMNSLQSNDTAIYYCARALTYYDYEFAYWGQGTLVTVSA

SEQ ID NO: 278 - protein, 119 aa, Artificial Sequence
  Variable HC	F063V
QVQLKQSGPGLVQPSQSLSITCTVSGFSLTNYGVHWVRQSPGKGLEWLGVIWSGGNTDYNTPVTSRLSINKDNSKSQVFFKMNSLQSNDTAIYYCARALTYYDYEFAYWGQGTLVTVSA

SEQ ID NO: 279 - protein, 119 aa, Artificial Sequence
  Variable HC	T064R
QVQLKQSGPGLVQPSQSLSITCTVSGFSLTNYGVHWVRQSPGKGLEWLGVIWSGGNTDYNTPFRSRLSINKDNSKSQVFFKMNSLQSNDTAIYYCARALTYYDYEFAYWGQGTLVTVSA

SEQ ID NO: 280 - protein, 119 aa, Artificial Sequence
  Variable HC	T064L
QVQLKQSGPGLVQPSQSLSITCTVSGFSLTNYGVHWVRQSPGKGLEWLGVIWSGGNTDYNTPFLSRLSINKDNSKSQVFFKMNSLQSNDTAIYYCARALTYYDYEFAYWGQGTLVTVSA

SEQ ID NO: 281 - protein, 119 aa, Artificial Sequence
  Variable HC	T064C
QVQLKQSGPGLVQPSQSLSITCTVSGFSLTNYGVHWVRQSPGKGLEWLGVIWSGGNTDYNTPFCSRLSINKDNSKSQVFFKMNSLQSNDTAIYYCARALTYYDYEFAYWGQGTLVTVSA

SEQ ID NO: 282 - protein, 119 aa, Artificial Sequence
  Variable HC	T064F
QVQLKQSGPGLVQPSQSLSITCTVSGFSLTNYGVHWVRQSPGKGLEWLGVIWSGGNTDYNTPFFSRLSINKDNSKSQVFFKMNSLQSNDTAIYYCARALTYYDYEFAYWGQGTLVTVSA

SEQ ID NO: 283 - protein, 119 aa, Artificial Sequence
  Variable HC	T064G
QVQLKQSGPGLVQPSQSLSITCTVSGFSLTNYGVHWVRQSPGKGLEWLGVIWSGGNTDYNTPFGSRLSINKDNSKSQVFFKMNSLQSNDTAIYYCARALTYYDYEFAYWGQGTLVTVSA

SEQ ID NO: 284 - protein, 119 aa, Artificial Sequence
  Variable HC	T064N
QVQLKQSGPGLVQPSQSLSITCTVSGFSLTNYGVHWVRQSPGKGLEWLGVIWSGGNTDYNTPFNSRLSINKDNSKSQVFFKMNSLQSNDTAIYYCARALTYYDYEFAYWGQGTLVTVSA

SEQ ID NO: 285 - protein, 119 aa, Artificial Sequence
  Variable HC	T064Q
QVQLKQSGPGLVQPSQSLSITCTVSGFSLTNYGVHWVRQSPGKGLEWLGVIWSGGNTDYNTPFQSRLSINKDNSKSQVFFKMNSLQSNDTAIYYCARALTYYDYEFAYWGQGTLVTVSA

SEQ ID NO: 286 - protein, 119 aa, Artificial Sequence
  Variable HC	T064V
QVQLKQSGPGLVQPSQSLSITCTVSGFSLTNYGVHWVRQSPGKGLEWLGVIWSGGNTDYNTPFVSRLSINKDNSKSQVFFKMNSLQSNDTAIYYCARALTYYDYEFAYWGQGTLVTVSA

SEQ ID NO: 287 - protein, 119 aa, Artificial Sequence
  Variable HC	S065H
QVQLKQSGPGLVQPSQSLSITCTVSGFSLTNYGVHWVRQSPGKGLEWLGVIWSGGNTDYNTPFTHRLSINKDNSKSQVFFKMNSLQSNDTAIYYCARALTYYDYEFAYWGQGTLVTVSA

SEQ ID NO: 288 - protein, 119 aa, Artificial Sequence
  Variable HC	S065R
QVQLKQSGPGLVQPSQSLSITCTVSGFSLTNYGVHWVRQSPGKGLEWLGVIWSGGNTDYNTPFTRRLSINKDNSKSQVFFKMNSLQSNDTAIYYCARALTYYDYEFAYWGQGTLVTVSA

SEQ ID NO: 289 - protein, 119 aa, Artificial Sequence
  Variable HC	S065L
QVQLKQSGPGLVQPSQSLSITCTVSGFSLTNYGVHWVRQSPGKGLEWLGVIWSGGNTDYNTPFTLRLSINKDNSKSQVFFKMNSLQSNDTAIYYCARALTYYDYEFAYWGQGTLVTVSA

SEQ ID NO: 290 - protein, 119 aa, Artificial Sequence
  Variable HC	S065C
QVQLKQSGPGLVQPSQSLSITCTVSGFSLTNYGVHWVRQSPGKGLEWLGVIWSGGNTDYNTPFTCRLSINKDNSKSQVFFKMNSLQSNDTAIYYCARALTYYDYEFAYWGQGTLVTVSA

SEQ ID NO: 291 - protein, 119 aa, Artificial Sequence
  Variable HC	S065E
QVQLKQSGPGLVQPSQSLSITCTVSGFSLTNYGVHWVRQSPGKGLEWLGVIWSGGNTDYNTPFTERLSINKDNSKSQVFFKMNSLQSNDTAIYYCARALTYYDYEFAYWGQGTLVTVSA

SEQ ID NO: 292 - protein, 119 aa, Artificial Sequence
  Variable HC	S065F
QVQLKQSGPGLVQPSQSLSITCTVSGFSLTNYGVHWVRQSPGKGLEWLGVIWSGGNTDYNTPFTFRLSINKDNSKSQVFFKMNSLQSNDTAIYYCARALTYYDYEFAYWGQGTLVTVSA

SEQ ID NO: 293 - protein, 119 aa, Artificial Sequence
  Variable HC	S065G
QVQLKQSGPGLVQPSQSLSITCTVSGFSLTNYGVHWVRQSPGKGLEWLGVIWSGGNTDYNTPFTGRLSINKDNSKSQVFFKMNSLQSNDTAIYYCARALTYYDYEFAYWGQGTLVTVSA

SEQ ID NO: 294 - protein, 119 aa, Artificial Sequence
  Variable HC	S065I
QVQLKQSGPGLVQPSQSLSITCTVSGFSLTNYGVHWVRQSPGKGLEWLGVIWSGGNTDYNTPFTIRLSINKDNSKSQVFFKMNSLQSNDTAIYYCARALTYYDYEFAYWGQGTLVTVSA

SEQ ID NO: 295 - protein, 119 aa, Artificial Sequence
  Variable HC	S065M
QVQLKQSGPGLVQPSQSLSITCTVSGFSLTNYGVHWVRQSPGKGLEWLGVIWSGGNTDYNTPFTMRLSINKDNSKSQVFFKMNSLQSNDTAIYYCARALTYYDYEFAYWGQGTLVTVSA

SEQ ID NO: 296 - protein, 119 aa, Artificial Sequence
  Variable HC	S065N
QVQLKQSGPGLVQPSQSLSITCTVSGFSLTNYGVHWVRQSPGKGLEWLGVIWSGGNTDYNTPFTNRLSINKDNSKSQVFFKMNSLQSNDTAIYYCARALTYYDYEFAYWGQGTLVTVSA

SEQ ID NO: 297 - protein, 119 aa, Artificial Sequence
  Variable HC	S065P
QVQLKQSGPGLVQPSQSLSITCTVSGFSLTNYGVHWVRQSPGKGLEWLGVIWSGGNTDYNTPFTPRLSINKDNSKSQVFFKMNSLQSNDTAIYYCARALTYYDYEFAYWGQGTLVTVSA

SEQ ID NO: 298 - protein, 119 aa, Artificial Sequence
  Variable HC	S065Q
QVQLKQSGPGLVQPSQSLSITCTVSGFSLTNYGVHWVRQSPGKGLEWLGVIWSGGNTDYNTPFTQRLSINKDNSKSQVFFKMNSLQSNDTAIYYCARALTYYDYEFAYWGQGTLVTVSA

SEQ ID NO: 299 - protein, 119 aa, Artificial Sequence
  Variable HC	S065T
QVQLKQSGPGLVQPSQSLSITCTVSGFSLTNYGVHWVRQSPGKGLEWLGVIWSGGNTDYNTPFTTRLSINKDNSKSQVFFKMNSLQSNDTAIYYCARALTYYDYEFAYWGQGTLVTVSA

SEQ ID NO: 300 - protein, 119 aa, Artificial Sequence
  Variable HC	S065W
QVQLKQSGPGLVQPSQSLSITCTVSGFSLTNYGVHWVRQSPGKGLEWLGVIWSGGNTDYNTPFTWRLSINKDNSKSQVFFKMNSLQSNDTAIYYCARALTYYDYEFAYWGQGTLVTVSA

SEQ ID NO: 301 - protein, 119 aa, Artificial Sequence
  Variable HC	S065Y
QVQLKQSGPGLVQPSQSLSITCTVSGFSLTNYGVHWVRQSPGKGLEWLGVIWSGGNTDYNTPFTYRLSINKDNSKSQVFFKMNSLQSNDTAIYYCARALTYYDYEFAYWGQGTLVTVSA

SEQ ID NO: 302 - protein, 119 aa, Artificial Sequence
  Variable HC	R066L
QVQLKQSGPGLVQPSQSLSITCTVSGFSLTNYGVHWVRQSPGKGLEWLGVIWSGGNTDYNTPFTSLLSINKDNSKSQVFFKMNSLQSNDTAIYYCARALTYYDYEFAYWGQGTLVTVSA

SEQ ID NO: 303 - protein, 119 aa, Artificial Sequence
  Variable HC	R066A
QVQLKQSGPGLVQPSQSLSITCTVSGFSLTNYGVHWVRQSPGKGLEWLGVIWSGGNTDYNTPFTSALSINKDNSKSQVFFKMNSLQSNDTAIYYCARALTYYDYEFAYWGQGTLVTVSA

SEQ ID NO: 304 - protein, 119 aa, Artificial Sequence
  Variable HC	R066C
QVQLKQSGPGLVQPSQSLSITCTVSGFSLTNYGVHWVRQSPGKGLEWLGVIWSGGNTDYNTPFTSCLSINKDNSKSQVFFKMNSLQSNDTAIYYCARALTYYDYEFAYWGQGTLVTVSA

SEQ ID NO: 305 - protein, 119 aa, Artificial Sequence
  Variable HC	R066E
QVQLKQSGPGLVQPSQSLSITCTVSGFSLTNYGVHWVRQSPGKGLEWLGVIWSGGNTDYNTPFTSELSINKDNSKSQVFFKMNSLQSNDTAIYYCARALTYYDYEFAYWGQGTLVTVSA

SEQ ID NO: 306 - protein, 119 aa, Artificial Sequence
  Variable HC	R066F
QVQLKQSGPGLVQPSQSLSITCTVSGFSLTNYGVHWVRQSPGKGLEWLGVIWSGGNTDYNTPFTSFLSINKDNSKSQVFFKMNSLQSNDTAIYYCARALTYYDYEFAYWGQGTLVTVSA

SEQ ID NO: 307 - protein, 119 aa, Artificial Sequence
  Variable HC	R066N
QVQLKQSGPGLVQPSQSLSITCTVSGFSLTNYGVHWVRQSPGKGLEWLGVIWSGGNTDYNTPFTSNLSINKDNSKSQVFFKMNSLQSNDTAIYYCARALTYYDYEFAYWGQGTLVTVSA

SEQ ID NO: 308 - protein, 119 aa, Artificial Sequence
  Variable HC	R066P
QVQLKQSGPGLVQPSQSLSITCTVSGFSLTNYGVHWVRQSPGKGLEWLGVIWSGGNTDYNTPFTSPLSINKDNSKSQVFFKMNSLQSNDTAIYYCARALTYYDYEFAYWGQGTLVTVSA

SEQ ID NO: 309 - protein, 119 aa, Artificial Sequence
  Variable HC	R066Q
QVQLKQSGPGLVQPSQSLSITCTVSGFSLTNYGVHWVRQSPGKGLEWLGVIWSGGNTDYNTPFTSQLSINKDNSKSQVFFKMNSLQSNDTAIYYCARALTYYDYEFAYWGQGTLVTVSA

SEQ ID NO: 310 - protein, 119 aa, Artificial Sequence
  Variable HC	R066S
QVQLKQSGPGLVQPSQSLSITCTVSGFSLTNYGVHWVRQSPGKGLEWLGVIWSGGNTDYNTPFTSSLSINKDNSKSQVFFKMNSLQSNDTAIYYCARALTYYDYEFAYWGQGTLVTVSA

SEQ ID NO: 311 - protein, 119 aa, Artificial Sequence
  Variable HC	R066T
QVQLKQSGPGLVQPSQSLSITCTVSGFSLTNYGVHWVRQSPGKGLEWLGVIWSGGNTDYNTPFTSTLSINKDNSKSQVFFKMNSLQSNDTAIYYCARALTYYDYEFAYWGQGTLVTVSA

SEQ ID NO: 312 - protein, 119 aa, Artificial Sequence
  Variable HC	R066V
QVQLKQSGPGLVQPSQSLSITCTVSGFSLTNYGVHWVRQSPGKGLEWLGVIWSGGNTDYNTPFTSVLSINKDNSKSQVFFKMNSLQSNDTAIYYCARALTYYDYEFAYWGQGTLVTVSA

SEQ ID NO: 313 - protein, 119 aa, Artificial Sequence
  Variable HC	R066G
QVQLKQSGPGLVQPSQSLSITCTVSGFSLTNYGVHWVRQSPGKGLEWLGVIWSGGNTDYNTPFTSGLSINKDNSKSQVFFKMNSLQSNDTAIYYCARALTYYDYEFAYWGQGTLVTVSA

SEQ ID NO: 314 - protein, 119 aa, Artificial Sequence
  Variable HC	L067A
QVQLKQSGPGLVQPSQSLSITCTVSGFSLTNYGVHWVRQSPGKGLEWLGVIWSGGNTDYNTPFTSRASINKDNSKSQVFFKMNSLQSNDTAIYYCARALTYYDYEFAYWGQGTLVTVSA

SEQ ID NO: 315 - protein, 119 aa, Artificial Sequence
  Variable HC	L067C
QVQLKQSGPGLVQPSQSLSITCTVSGFSLTNYGVHWVRQSPGKGLEWLGVIWSGGNTDYNTPFTSRCSINKDNSKSQVFFKMNSLQSNDTAIYYCARALTYYDYEFAYWGQGTLVTVSA

SEQ ID NO: 316 - protein, 119 aa, Artificial Sequence
  Variable HC	L067D
QVQLKQSGPGLVQPSQSLSITCTVSGFSLTNYGVHWVRQSPGKGLEWLGVIWSGGNTDYNTPFTSRDSINKDNSKSQVFFKMNSLQSNDTAIYYCARALTYYDYEFAYWGQGTLVTVSA

SEQ ID NO: 317 - protein, 119 aa, Artificial Sequence
  Variable HC	L067E
QVQLKQSGPGLVQPSQSLSITCTVSGFSLTNYGVHWVRQSPGKGLEWLGVIWSGGNTDYNTPFTSRESINKDNSKSQVFFKMNSLQSNDTAIYYCARALTYYDYEFAYWGQGTLVTVSA

SEQ ID NO: 318 - protein, 119 aa, Artificial Sequence
  Variable HC	L067I
QVQLKQSGPGLVQPSQSLSITCTVSGFSLTNYGVHWVRQSPGKGLEWLGVIWSGGNTDYNTPFTSRISINKDNSKSQVFFKMNSLQSNDTAIYYCARALTYYDYEFAYWGQGTLVTVSA

SEQ ID NO: 319 - protein, 119 aa, Artificial Sequence
  Variable HC	L067M
QVQLKQSGPGLVQPSQSLSITCTVSGFSLTNYGVHWVRQSPGKGLEWLGVIWSGGNTDYNTPFTSRMSINKDNSKSQVFFKMNSLQSNDTAIYYCARALTYYDYEFAYWGQGTLVTVSA

SEQ ID NO: 320 - protein, 119 aa, Artificial Sequence
  Variable HC	L067Q
QVQLKQSGPGLVQPSQSLSITCTVSGFSLTNYGVHWVRQSPGKGLEWLGVIWSGGNTDYNTPFTSRQSINKDNSKSQVFFKMNSLQSNDTAIYYCARALTYYDYEFAYWGQGTLVTVSA

SEQ ID NO: 321 - protein, 119 aa, Artificial Sequence
  Variable HC	L067S
QVQLKQSGPGLVQPSQSLSITCTVSGFSLTNYGVHWVRQSPGKGLEWLGVIWSGGNTDYNTPFTSRSSINKDNSKSQVFFKMNSLQSNDTAIYYCARALTYYDYEFAYWGQGTLVTVSA

SEQ ID NO: 322 - protein, 119 aa, Artificial Sequence
  Variable HC	L067T
QVQLKQSGPGLVQPSQSLSITCTVSGFSLTNYGVHWVRQSPGKGLEWLGVIWSGGNTDYNTPFTSRTSINKDNSKSQVFFKMNSLQSNDTAIYYCARALTYYDYEFAYWGQGTLVTVSA

SEQ ID NO: 323 - protein, 119 aa, Artificial Sequence
  Variable HC	L067V
QVQLKQSGPGLVQPSQSLSITCTVSGFSLTNYGVHWVRQSPGKGLEWLGVIWSGGNTDYNTPFTSRVSINKDNSKSQVFFKMNSLQSNDTAIYYCARALTYYDYEFAYWGQGTLVTVSA

SEQ ID NO: 324 - protein, 119 aa, Artificial Sequence
  Variable HC	L067Y
QVQLKQSGPGLVQPSQSLSITCTVSGFSLTNYGVHWVRQSPGKGLEWLGVIWSGGNTDYNTPFTSRYSINKDNSKSQVFFKMNSLQSNDTAIYYCARALTYYDYEFAYWGQGTLVTVSA

SEQ ID NO: 325 - protein, 119 aa, Artificial Sequence
  Variable HC	S068K
QVQLKQSGPGLVQPSQSLSITCTVSGFSLTNYGVHWVRQSPGKGLEWLGVIWSGGNTDYNTPFTSRLKINKDNSKSQVFFKMNSLQSNDTAIYYCARALTYYDYEFAYWGQGTLVTVSA

SEQ ID NO: 326 - protein, 119 aa, Artificial Sequence
  Variable HC	S068H
QVQLKQSGPGLVQPSQSLSITCTVSGFSLTNYGVHWVRQSPGKGLEWLGVIWSGGNTDYNTPFTSRLHINKDNSKSQVFFKMNSLQSNDTAIYYCARALTYYDYEFAYWGQGTLVTVSA

SEQ ID NO: 327 - protein, 119 aa, Artificial Sequence
  Variable HC	S068R
QVQLKQSGPGLVQPSQSLSITCTVSGFSLTNYGVHWVRQSPGKGLEWLGVIWSGGNTDYNTPFTSRLRINKDNSKSQVFFKMNSLQSNDTAIYYCARALTYYDYEFAYWGQGTLVTVSA

SEQ ID NO: 328 - protein, 119 aa, Artificial Sequence
  Variable HC	S068L
QVQLKQSGPGLVQPSQSLSITCTVSGFSLTNYGVHWVRQSPGKGLEWLGVIWSGGNTDYNTPFTSRLLINKDNSKSQVFFKMNSLQSNDTAIYYCARALTYYDYEFAYWGQGTLVTVSA

SEQ ID NO: 329 - protein, 119 aa, Artificial Sequence
  Variable HC	S068C
QVQLKQSGPGLVQPSQSLSITCTVSGFSLTNYGVHWVRQSPGKGLEWLGVIWSGGNTDYNTPFTSRLCINKDNSKSQVFFKMNSLQSNDTAIYYCARALTYYDYEFAYWGQGTLVTVSA

SEQ ID NO: 330 - protein, 119 aa, Artificial Sequence
  Variable HC	S068D
QVQLKQSGPGLVQPSQSLSITCTVSGFSLTNYGVHWVRQSPGKGLEWLGVIWSGGNTDYNTPFTSRLDINKDNSKSQVFFKMNSLQSNDTAIYYCARALTYYDYEFAYWGQGTLVTVSA

SEQ ID NO: 331 - protein, 119 aa, Artificial Sequence
  Variable HC S068E
QVQLKQSGPGLVQPSQSLSITCTVSGFSLTNYGVHWVRQSPGKGLEWLGVIWSGGNTDYNTPFTSRLEINKDNSKSQVFFKMNSLQSNDTAIYYCARALTYYDYEFAYWGQGTLVTVSA

SEQ ID NO: 332 - protein, 119 aa, Artificial Sequence
  Variable HC	S068F
QVQLKQSGPGLVQPSQSLSITCTVSGFSLTNYGVHWVRQSPGKGLEWLGVIWSGGNTDYNTPFTSRLFINKDNSKSQVFFKMNSLQSNDTAIYYCARALTYYDYEFAYWGQGTLVTVSA

SEQ ID NO: 333 - protein, 119 aa, Artificial Sequence
  Variable HC	S068G
QVQLKQSGPGLVQPSQSLSITCTVSGFSLTNYGVHWVRQSPGKGLEWLGVIWSGGNTDYNTPFTSRLGINKDNSKSQVFFKMNSLQSNDTAIYYCARALTYYDYEFAYWGQGTLVTVSA

SEQ ID NO: 334 - protein, 119 aa, Artificial Sequence
  Variable HC	S068I
QVQLKQSGPGLVQPSQSLSITCTVSGFSLTNYGVHWVRQSPGKGLEWLGVIWSGGNTDYNTPFTSRLIINKDNSKSQVFFKMNSLQSNDTAIYYCARALTYYDYEFAYWGQGTLVTVSA

SEQ ID NO: 335 - protein, 119 aa, Artificial Sequence
  Variable HC	S068N
QVQLKQSGPGLVQPSQSLSITCTVSGFSLTNYGVHWVRQSPGKGLEWLGVIWSGGNTDYNTPFTSRLNINKDNSKSQVFFKMNSLQSNDTAIYYCARALTYYDYEFAYWGQGTLVTVSA

SEQ ID NO: 336 - protein, 119 aa, Artificial Sequence
  Variable HC	S068Q
QVQLKQSGPGLVQPSQSLSITCTVSGFSLTNYGVHWVRQSPGKGLEWLGVIWSGGNTDYNTPFTSRLQINKDNSKSQVFFKMNSLQSNDTAIYYCARALTYYDYEFAYWGQGTLVTVSA

SEQ ID NO: 337 - protein, 119 aa, Artificial Sequence
  Variable HC	S068T
QVQLKQSGPGLVQPSQSLSITCTVSGFSLTNYGVHWVRQSPGKGLEWLGVIWSGGNTDYNTPFTSRLTINKDNSKSQVFFKMNSLQSNDTAIYYCARALTYYDYEFAYWGQGTLVTVSA

SEQ ID NO: 338 - protein, 119 aa, Artificial Sequence
  Variable HC	S068V
QVQLKQSGPGLVQPSQSLSITCTVSGFSLTNYGVHWVRQSPGKGLEWLGVIWSGGNTDYNTPFTSRLVINKDNSKSQVFFKMNSLQSNDTAIYYCARALTYYDYEFAYWGQGTLVTVSA

SEQ ID NO: 339 - protein, 119 aa, Artificial Sequence
  Variable HC	I069A
QVQLKQSGPGLVQPSQSLSITCTVSGFSLTNYGVHWVRQSPGKGLEWLGVIWSGGNTDYNTPFTSRLSANKDNSKSQVFFKMNSLQSNDTAIYYCARALTYYDYEFAYWGQGTLVTVSA

SEQ ID NO: 340 - protein, 119 aa, Artificial Sequence
  Variable HC	I069C
QVQLKQSGPGLVQPSQSLSITCTVSGFSLTNYGVHWVRQSPGKGLEWLGVIWSGGNTDYNTPFTSRLSCNKDNSKSQVFFKMNSLQSNDTAIYYCARALTYYDYEFAYWGQGTLVTVSA

SEQ ID NO: 341 - protein, 119 aa, Artificial Sequence
  Variable HC	I069G
QVQLKQSGPGLVQPSQSLSITCTVSGFSLTNYGVHWVRQSPGKGLEWLGVIWSGGNTDYNTPFTSRLSGNKDNSKSQVFFKMNSLQSNDTAIYYCARALTYYDYEFAYWGQGTLVTVSA

SEQ ID NO: 342 - protein, 119 aa, Artificial Sequence
  Variable HC	I069Y
QVQLKQSGPGLVQPSQSLSITCTVSGFSLTNYGVHWVRQSPGKGLEWLGVIWSGGNTDYNTPFTSRLSYNKDNSKSQVFFKMNSLQSNDTAIYYCARALTYYDYEFAYWGQGTLVTVSA

SEQ ID NO: 343 - protein, 119 aa, Artificial Sequence
  Variable HC	N070H
QVQLKQSGPGLVQPSQSLSITCTVSGFSLTNYGVHWVRQSPGKGLEWLGVIWSGGNTDYNTPFTSRLSIHKDNSKSQVFFKMNSLQSNDTAIYYCARALTYYDYEFAYWGQGTLVTVSA

SEQ ID NO: 344 - protein, 119 aa, Artificial Sequence
  Variable HC	N070R
QVQLKQSGPGLVQPSQSLSITCTVSGFSLTNYGVHWVRQSPGKGLEWLGVIWSGGNTDYNTPFTSRLSIRKDNSKSQVFFKMNSLQSNDTAIYYCARALTYYDYEFAYWGQGTLVTVSA

SEQ ID NO: 345 - protein, 119 aa, Artificial Sequence
  Variable HC	N070L
QVQLKQSGPGLVQPSQSLSITCTVSGFSLTNYGVHWVRQSPGKGLEWLGVIWSGGNTDYNTPFTSRLSILKDNSKSQVFFKMNSLQSNDTAIYYCARALTYYDYEFAYWGQGTLVTVSA

SEQ ID NO: 346 - protein, 119 aa, Artificial Sequence
  Variable HC	N070D
QVQLKQSGPGLVQPSQSLSITCTVSGFSLTNYGVHWVRQSPGKGLEWLGVIWSGGNTDYNTPFTSRLSIDKDNSKSQVFFKMNSLQSNDTAIYYCARALTYYDYEFAYWGQGTLVTVSA

SEQ ID NO: 347 - protein, 119 aa, Artificial Sequence
  Variable HC	N070E
QVQLKQSGPGLVQPSQSLSITCTVSGFSLTNYGVHWVRQSPGKGLEWLGVIWSGGNTDYNTPFTSRLSIEKDNSKSQVFFKMNSLQSNDTAIYYCARALTYYDYEFAYWGQGTLVTVSA

SEQ ID NO: 348 - protein, 119 aa, Artificial Sequence
  Variable HC	N070F
QVQLKQSGPGLVQPSQSLSITCTVSGFSLTNYGVHWVRQSPGKGLEWLGVIWSGGNTDYNTPFTSRLSIFKDNSKSQVFFKMNSLQSNDTAIYYCARALTYYDYEFAYWGQGTLVTVSA

SEQ ID NO: 349 - protein, 119 aa, Artificial Sequence
  Variable HC	N070G
QVQLKQSGPGLVQPSQSLSITCTVSGFSLTNYGVHWVRQSPGKGLEWLGVIWSGGNTDYNTPFTSRLSIGKDNSKSQVFFKMNSLQSNDTAIYYCARALTYYDYEFAYWGQGTLVTVSA

SEQ ID NO: 350 - protein, 119 aa, Artificial Sequence
  Variable HC	N070I
QVQLKQSGPGLVQPSQSLSITCTVSGFSLTNYGVHWVRQSPGKGLEWLGVIWSGGNTDYNTPFTSRLSIIKDNSKSQVFFKMNSLQSNDTAIYYCARALTYYDYEFAYWGQGTLVTVSA

SEQ ID NO: 351 - protein, 119 aa, Artificial Sequence
  Variable HC	N070P
QVQLKQSGPGLVQPSQSLSITCTVSGFSLTNYGVHWVRQSPGKGLEWLGVIWSGGNTDYNTPFTSRLSIPKDNSKSQVFFKMNSLQSNDTAIYYCARALTYYDYEFAYWGQGTLVTVSA

SEQ ID NO: 352 - protein, 119 aa, Artificial Sequence
  Variable HC	N070Q
QVQLKQSGPGLVQPSQSLSITCTVSGFSLTNYGVHWVRQSPGKGLEWLGVIWSGGNTDYNTPFTSRLSIQKDNSKSQVFFKMNSLQSNDTAIYYCARALTYYDYEFAYWGQGTLVTVSA

SEQ ID NO: 353 - protein, 119 aa, Artificial Sequence
  Variable HC	N070S
QVQLKQSGPGLVQPSQSLSITCTVSGFSLTNYGVHWVRQSPGKGLEWLGVIWSGGNTDYNTPFTSRLSISKDNSKSQVFFKMNSLQSNDTAIYYCARALTYYDYEFAYWGQGTLVTVSA

SEQ ID NO: 354 - protein, 119 aa, Artificial Sequence
  Variable HC	N070T
QVQLKQSGPGLVQPSQSLSITCTVSGFSLTNYGVHWVRQSPGKGLEWLGVIWSGGNTDYNTPFTSRLSITKDNSKSQVFFKMNSLQSNDTAIYYCARALTYYDYEFAYWGQGTLVTVSA

SEQ ID NO: 355 - protein, 119 aa, Artificial Sequence
  Variable HC	N070V
QVQLKQSGPGLVQPSQSLSITCTVSGFSLTNYGVHWVRQSPGKGLEWLGVIWSGGNTDYNTPFTSRLSIVKDNSKSQVFFKMNSLQSNDTAIYYCARALTYYDYEFAYWGQGTLVTVSA

SEQ ID NO: 356 - protein, 119 aa, Artificial Sequence
  Variable HC	N070Y
QVQLKQSGPGLVQPSQSLSITCTVSGFSLTNYGVHWVRQSPGKGLEWLGVIWSGGNTDYNTPFTSRLSIYKDNSKSQVFFKMNSLQSNDTAIYYCARALTYYDYEFAYWGQGTLVTVSA

SEQ ID NO: 357 - protein, 119 aa, Artificial Sequence
  Variable HC	K071H
QVQLKQSGPGLVQPSQSLSITCTVSGFSLTNYGVHWVRQSPGKGLEWLGVIWSGGNTDYNTPFTSRLSINHDNSKSQVFFKMNSLQSNDTAIYYCARALTYYDYEFAYWGQGTLVTVSA

SEQ ID NO: 358 - protein, 119 aa, Artificial Sequence
  Variable HC	K071R
QVQLKQSGPGLVQPSQSLSITCTVSGFSLTNYGVHWVRQSPGKGLEWLGVIWSGGNTDYNTPFTSRLSINRDNSKSQVFFKMNSLQSNDTAIYYCARALTYYDYEFAYWGQGTLVTVSA

SEQ ID NO: 359 - protein, 119 aa, Artificial Sequence
  Variable HC	K071L
QVQLKQSGPGLVQPSQSLSITCTVSGFSLTNYGVHWVRQSPGKGLEWLGVIWSGGNTDYNTPFTSRLSINLDNSKSQVFFKMNSLQSNDTAIYYCARALTYYDYEFAYWGQGTLVTVSA

SEQ ID NO: 360 - protein, 119 aa, Artificial Sequence
  Variable HC	K071A
QVQLKQSGPGLVQPSQSLSITCTVSGFSLTNYGVHWVRQSPGKGLEWLGVIWSGGNTDYNTPFTSRLSINADNSKSQVFFKMNSLQSNDTAIYYCARALTYYDYEFAYWGQGTLVTVSA

SEQ ID NO: 361 - protein, 119 aa, Artificial Sequence
  Variable HC	K071C
QVQLKQSGPGLVQPSQSLSITCTVSGFSLTNYGVHWVRQSPGKGLEWLGVIWSGGNTDYNTPFTSRLSINCDNSKSQVFFKMNSLQSNDTAIYYCARALTYYDYEFAYWGQGTLVTVSA

SEQ ID NO: 362 - protein, 119 aa, Artificial Sequence
  Variable HC	K071F
QVQLKQSGPGLVQPSQSLSITCTVSGFSLTNYGVHWVRQSPGKGLEWLGVIWSGGNTDYNTPFTSRLSINFDNSKSQVFFKMNSLQSNDTAIYYCARALTYYDYEFAYWGQGTLVTVSA

SEQ ID NO: 363 - protein, 119 aa, Artificial Sequence
  Variable HC	K071G
QVQLKQSGPGLVQPSQSLSITCTVSGFSLTNYGVHWVRQSPGKGLEWLGVIWSGGNTDYNTPFTSRLSINGDNSKSQVFFKMNSLQSNDTAIYYCARALTYYDYEFAYWGQGTLVTVSA

SEQ ID NO: 364 - protein, 119 aa, Artificial Sequence
  Variable HC	K071Q
QVQLKQSGPGLVQPSQSLSITCTVSGFSLTNYGVHWVRQSPGKGLEWLGVIWSGGNTDYNTPFTSRLSINQDNSKSQVFFKMNSLQSNDTAIYYCARALTYYDYEFAYWGQGTLVTVSA

SEQ ID NO: 365 - protein, 119 aa, Artificial Sequence
  Variable HC	K071S
QVQLKQSGPGLVQPSQSLSITCTVSGFSLTNYGVHWVRQSPGKGLEWLGVIWSGGNTDYNTPFTSRLSINSDNSKSQVFFKMNSLQSNDTAIYYCARALTYYDYEFAYWGQGTLVTVSA

SEQ ID NO: 366 - protein, 119 aa, Artificial Sequence
  Variable HC	K071T
QVQLKQSGPGLVQPSQSLSITCTVSGFSLTNYGVHWVRQSPGKGLEWLGVIWSGGNTDYNTPFTSRLSINTDNSKSQVFFKMNSLQSNDTAIYYCARALTYYDYEFAYWGQGTLVTVSA

SEQ ID NO: 367 - protein, 119 aa, Artificial Sequence
  Variable HC	K071V
QVQLKQSGPGLVQPSQSLSITCTVSGFSLTNYGVHWVRQSPGKGLEWLGVIWSGGNTDYNTPFTSRLSINVDNSKSQVFFKMNSLQSNDTAIYYCARALTYYDYEFAYWGQGTLVTVSA

SEQ ID NO: 368 - protein, 119 aa, Artificial Sequence
  Variable HC	K071W
QVQLKQSGPGLVQPSQSLSITCTVSGFSLTNYGVHWVRQSPGKGLEWLGVIWSGGNTDYNTPFTSRLSINWDNSKSQVFFKMNSLQSNDTAIYYCARALTYYDYEFAYWGQGTLVTVSA

SEQ ID NO: 369 - protein, 119 aa, Artificial Sequence
  Variable HC	K071Y
QVQLKQSGPGLVQPSQSLSITCTVSGFSLTNYGVHWVRQSPGKGLEWLGVIWSGGNTDYNTPFTSRLSINYDNSKSQVFFKMNSLQSNDTAIYYCARALTYYDYEFAYWGQGTLVTVSA

SEQ ID NO: 370 - protein, 119 aa, Artificial Sequence
  Variable HC	D072K
QVQLKQSGPGLVQPSQSLSITCTVSGFSLTNYGVHWVRQSPGKGLEWLGVIWSGGNTDYNTPFTSRLSINKKNSKSQVFFKMNSLQSNDTAIYYCARALTYYDYEFAYWGQGTLVTVSA

SEQ ID NO: 371 - protein, 119 aa, Artificial Sequence
  Variable HC	D072H
QVQLKQSGPGLVQPSQSLSITCTVSGFSLTNYGVHWVRQSPGKGLEWLGVIWSGGNTDYNTPFTSRLSINKHNSKSQVFFKMNSLQSNDTAIYYCARALTYYDYEFAYWGQGTLVTVSA

SEQ ID NO: 372 - protein, 119 aa, Artificial Sequence
  Variable HC	D072R
QVQLKQSGPGLVQPSQSLSITCTVSGFSLTNYGVHWVRQSPGKGLEWLGVIWSGGNTDYNTPFTSRLSINKRNSKSQVFFKMNSLQSNDTAIYYCARALTYYDYEFAYWGQGTLVTVSA

SEQ ID NO: 373 - protein, 119 aa, Artificial Sequence
  Variable HC	D072L
QVQLKQSGPGLVQPSQSLSITCTVSGFSLTNYGVHWVRQSPGKGLEWLGVIWSGGNTDYNTPFTSRLSINKLNSKSQVFFKMNSLQSNDTAIYYCARALTYYDYEFAYWGQGTLVTVSA

SEQ ID NO: 374 - protein, 119 aa, Artificial Sequence
  Variable HC	D072A
QVQLKQSGPGLVQPSQSLSITCTVSGFSLTNYGVHWVRQSPGKGLEWLGVIWSGGNTDYNTPFTSRLSINKANSKSQVFFKMNSLQSNDTAIYYCARALTYYDYEFAYWGQGTLVTVSA

SEQ ID NO: 375 - protein, 119 aa, Artificial Sequence
  Variable HC	D072G
QVQLKQSGPGLVQPSQSLSITCTVSGFSLTNYGVHWVRQSPGKGLEWLGVIWSGGNTDYNTPFTSRLSINKGNSKSQVFFKMNSLQSNDTAIYYCARALTYYDYEFAYWGQGTLVTVSA

SEQ ID NO: 376 - protein, 119 aa, Artificial Sequence
  Variable HC	D072I
QVQLKQSGPGLVQPSQSLSITCTVSGFSLTNYGVHWVRQSPGKGLEWLGVIWSGGNTDYNTPFTSRLSINKINSKSQVFFKMNSLQSNDTAIYYCARALTYYDYEFAYWGQGTLVTVSA

SEQ ID NO: 377 - protein, 119 aa, Artificial Sequence
  Variable HC	D072M
QVQLKQSGPGLVQPSQSLSITCTVSGFSLTNYGVHWVRQSPGKGLEWLGVIWSGGNTDYNTPFTSRLSINKMNSKSQVFFKMNSLQSNDTAIYYCARALTYYDYEFAYWGQGTLVTVSA

SEQ ID NO: 378 - protein, 119 aa, Artificial Sequence
  Variable HC	D072N
QVQLKQSGPGLVQPSQSLSITCTVSGFSLTNYGVHWVRQSPGKGLEWLGVIWSGGNTDYNTPFTSRLSINKNNSKSQVFFKMNSLQSNDTAIYYCARALTYYDYEFAYWGQGTLVTVSA

SEQ ID NO: 379 - protein, 119 aa, Artificial Sequence
  Variable HC	D072Q
QVQLKQSGPGLVQPSQSLSITCTVSGFSLTNYGVHWVRQSPGKGLEWLGVIWSGGNTDYNTPFTSRLSINKQNSKSQVFFKMNSLQSNDTAIYYCARALTYYDYEFAYWGQGTLVTVSA

SEQ ID NO: 380 - protein, 119 aa, Artificial Sequence
  Variable HC	D072S
QVQLKQSGPGLVQPSQSLSITCTVSGFSLTNYGVHWVRQSPGKGLEWLGVIWSGGNTDYNTPFTSRLSINKSNSKSQVFFKMNSLQSNDTAIYYCARALTYYDYEFAYWGQGTLVTVSA

SEQ ID NO: 381 - protein, 119 aa, Artificial Sequence
  Variable HC	D072V
QVQLKQSGPGLVQPSQSLSITCTVSGFSLTNYGVHWVRQSPGKGLEWLGVIWSGGNTDYNTPFTSRLSINKVNSKSQVFFKMNSLQSNDTAIYYCARALTYYDYEFAYWGQGTLVTVSA

SEQ ID NO: 382 - protein, 119 aa, Artificial Sequence
  Variable HC	D072W
QVQLKQSGPGLVQPSQSLSITCTVSGFSLTNYGVHWVRQSPGKGLEWLGVIWSGGNTDYNTPFTSRLSINKWNSKSQVFFKMNSLQSNDTAIYYCARALTYYDYEFAYWGQGTLVTVSA

SEQ ID NO: 383 - protein, 119 aa, Artificial Sequence
  Variable HC	D072Y
QVQLKQSGPGLVQPSQSLSITCTVSGFSLTNYGVHWVRQSPGKGLEWLGVIWSGGNTDYNTPFTSRLSINKYNSKSQVFFKMNSLQSNDTAIYYCARALTYYDYEFAYWGQGTLVTVSA

SEQ ID NO: 384 - protein, 119 aa, Artificial Sequence
  Variable HC	N073H
QVQLKQSGPGLVQPSQSLSITCTVSGFSLTNYGVHWVRQSPGKGLEWLGVIWSGGNTDYNTPFTSRLSINKDHSKSQVFFKMNSLQSNDTAIYYCARALTYYDYEFAYWGQGTLVTVSA

SEQ ID NO: 385 - protein, 119 aa, Artificial Sequence
  Variable HC	N073R
QVQLKQSGPGLVQPSQSLSITCTVSGFSLTNYGVHWVRQSPGKGLEWLGVIWSGGNTDYNTPFTSRLSINKDRSKSQVFFKMNSLQSNDTAIYYCARALTYYDYEFAYWGQGTLVTVSA

SEQ ID NO: 386 - protein, 119 aa, Artificial Sequence
  Variable HC	N073L
QVQLKQSGPGLVQPSQSLSITCTVSGFSLTNYGVHWVRQSPGKGLEWLGVIWSGGNTDYNTPFTSRLSINKDLSKSQVFFKMNSLQSNDTAIYYCARALTYYDYEFAYWGQGTLVTVSA

SEQ ID NO: 387 - protein, 119 aa, Artificial Sequence
  Variable HC	N073A
QVQLKQSGPGLVQPSQSLSITCTVSGFSLTNYGVHWVRQSPGKGLEWLGVIWSGGNTDYNTPFTSRLSINKDASKSQVFFKMNSLQSNDTAIYYCARALTYYDYEFAYWGQGTLVTVSA

SEQ ID NO: 388 - protein, 119 aa, Artificial Sequence
  Variable HC	N073C
QVQLKQSGPGLVQPSQSLSITCTVSGFSLTNYGVHWVRQSPGKGLEWLGVIWSGGNTDYNTPFTSRLSINKDCSKSQVFFKMNSLQSNDTAIYYCARALTYYDYEFAYWGQGTLVTVSA

SEQ ID NO: 389 - protein, 119 aa, Artificial Sequence
  Variable HC	N073G
QVQLKQSGPGLVQPSQSLSITCTVSGFSLTNYGVHWVRQSPGKGLEWLGVIWSGGNTDYNTPFTSRLSINKDGSKSQVFFKMNSLQSNDTAIYYCARALTYYDYEFAYWGQGTLVTVSA

SEQ ID NO: 390 - protein, 119 aa, Artificial Sequence
  Variable HC	N073I
QVQLKQSGPGLVQPSQSLSITCTVSGFSLTNYGVHWVRQSPGKGLEWLGVIWSGGNTDYNTPFTSRLSINKDISKSQVFFKMNSLQSNDTAIYYCARALTYYDYEFAYWGQGTLVTVSA

SEQ ID NO: 391 - protein, 119 aa, Artificial Sequence
  Variable HC	N073M
QVQLKQSGPGLVQPSQSLSITCTVSGFSLTNYGVHWVRQSPGKGLEWLGVIWSGGNTDYNTPFTSRLSINKDMSKSQVFFKMNSLQSNDTAIYYCARALTYYDYEFAYWGQGTLVTVSA

SEQ ID NO: 392 - protein, 119 aa, Artificial Sequence
  Variable HC	N073P
QVQLKQSGPGLVQPSQSLSITCTVSGFSLTNYGVHWVRQSPGKGLEWLGVIWSGGNTDYNTPFTSRLSINKDPSKSQVFFKMNSLQSNDTAIYYCARALTYYDYEFAYWGQGTLVTVSA

SEQ ID NO: 393 - protein, 119 aa, Artificial Sequence
  Variable HC	N073Q
QVQLKQSGPGLVQPSQSLSITCTVSGFSLTNYGVHWVRQSPGKGLEWLGVIWSGGNTDYNTPFTSRLSINKDQSKSQVFFKMNSLQSNDTAIYYCARALTYYDYEFAYWGQGTLVTVSA

SEQ ID NO: 394 - protein, 119 aa, Artificial Sequence
  Variable HC	N073S
QVQLKQSGPGLVQPSQSLSITCTVSGFSLTNYGVHWVRQSPGKGLEWLGVIWSGGNTDYNTPFTSRLSINKDSSKSQVFFKMNSLQSNDTAIYYCARALTYYDYEFAYWGQGTLVTVSA

SEQ ID NO: 395 - protein, 119 aa, Artificial Sequence
  Variable HC	N073T
QVQLKQSGPGLVQPSQSLSITCTVSGFSLTNYGVHWVRQSPGKGLEWLGVIWSGGNTDYNTPFTSRLSINKDTSKSQVFFKMNSLQSNDTAIYYCARALTYYDYEFAYWGQGTLVTVSA

SEQ ID NO: 396 - protein, 119 aa, Artificial Sequence
  Variable HC	N073V
QVQLKQSGPGLVQPSQSLSITCTVSGFSLTNYGVHWVRQSPGKGLEWLGVIWSGGNTDYNTPFTSRLSINKDVSKSQVFFKMNSLQSNDTAIYYCARALTYYDYEFAYWGQGTLVTVSA

SEQ ID NO: 397 - protein, 119 aa, Artificial Sequence
  Variable HC	N073W
QVQLKQSGPGLVQPSQSLSITCTVSGFSLTNYGVHWVRQSPGKGLEWLGVIWSGGNTDYNTPFTSRLSINKDWSKSQVFFKMNSLQSNDTAIYYCARALTYYDYEFAYWGQGTLVTVSA

SEQ ID NO: 398 - protein, 119 aa, Artificial Sequence
  Variable HC	N073Y
QVQLKQSGPGLVQPSQSLSITCTVSGFSLTNYGVHWVRQSPGKGLEWLGVIWSGGNTDYNTPFTSRLSINKDYSKSQVFFKMNSLQSNDTAIYYCARALTYYDYEFAYWGQGTLVTVSA

SEQ ID NO: 399 - protein, 119 aa, Artificial Sequence
  Variable HC	S074K
QVQLKQSGPGLVQPSQSLSITCTVSGFSLTNYGVHWVRQSPGKGLEWLGVIWSGGNTDYNTPFTSRLSINKDNKKSQVFFKMNSLQSNDTAIYYCARALTYYDYEFAYWGQGTLVTVSA

SEQ ID NO: 400 - protein, 119 aa, Artificial Sequence
  Variable HC	S074H
QVQLKQSGPGLVQPSQSLSITCTVSGFSLTNYGVHWVRQSPGKGLEWLGVIWSGGNTDYNTPFTSRLSINKDNHKSQVFFKMNSLQSNDTAIYYCARALTYYDYEFAYWGQGTLVTVSA

SEQ ID NO: 401 - protein, 119 aa, Artificial Sequence
  Variable HC	S074R
QVQLKQSGPGLVQPSQSLSITCTVSGFSLTNYGVHWVRQSPGKGLEWLGVIWSGGNTDYNTPFTSRLSINKDNRKSQVFFKMNSLQSNDTAIYYCARALTYYDYEFAYWGQGTLVTVSA

SEQ ID NO: 402 - protein, 119 aa, Artificial Sequence
  Variable HC	S074L
QVQLKQSGPGLVQPSQSLSITCTVSGFSLTNYGVHWVRQSPGKGLEWLGVIWSGGNTDYNTPFTSRLSINKDNLKSQVFFKMNSLQSNDTAIYYCARALTYYDYEFAYWGQGTLVTVSA

SEQ ID NO: 403 - protein, 119 aa, Artificial Sequence
  Variable HC	S074A
QVQLKQSGPGLVQPSQSLSITCTVSGFSLTNYGVHWVRQSPGKGLEWLGVIWSGGNTDYNTPFTSRLSINKDNAKSQVFFKMNSLQSNDTAIYYCARALTYYDYEFAYWGQGTLVTVSA

SEQ ID NO: 404 - protein, 119 aa, Artificial Sequence
  Variable HC	S074C
QVQLKQSGPGLVQPSQSLSITCTVSGFSLTNYGVHWVRQSPGKGLEWLGVIWSGGNTDYNTPFTSRLSINKDNCKSQVFFKMNSLQSNDTAIYYCARALTYYDYEFAYWGQGTLVTVSA

SEQ ID NO: 405 - protein, 119 aa, Artificial Sequence
  Variable HC	S074D
QVQLKQSGPGLVQPSQSLSITCTVSGFSLTNYGVHWVRQSPGKGLEWLGVIWSGGNTDYNTPFTSRLSINKDNDKSQVFFKMNSLQSNDTAIYYCARALTYYDYEFAYWGQGTLVTVSA

SEQ ID NO: 406 - protein, 119 aa, Artificial Sequence
  Variable HC	S074E
QVQLKQSGPGLVQPSQSLSITCTVSGFSLTNYGVHWVRQSPGKGLEWLGVIWSGGNTDYNTPFTSRLSINKDNEKSQVFFKMNSLQSNDTAIYYCARALTYYDYEFAYWGQGTLVTVSA

SEQ ID NO: 407 - protein, 119 aa, Artificial Sequence
  Variable HC	S074G
QVQLKQSGPGLVQPSQSLSITCTVSGFSLTNYGVHWVRQSPGKGLEWLGVIWSGGNTDYNTPFTSRLSINKDNGKSQVFFKMNSLQSNDTAIYYCARALTYYDYEFAYWGQGTLVTVSA

SEQ ID NO: 408 - protein, 119 aa, Artificial Sequence
  Variable HC	S074I
QVQLKQSGPGLVQPSQSLSITCTVSGFSLTNYGVHWVRQSPGKGLEWLGVIWSGGNTDYNTPFTSRLSINKDNIKSQVFFKMNSLQSNDTAIYYCARALTYYDYEFAYWGQGTLVTVSA

SEQ ID NO: 409 - protein, 119 aa, Artificial Sequence
  Variable HC	S074M
QVQLKQSGPGLVQPSQSLSITCTVSGFSLTNYGVHWVRQSPGKGLEWLGVIWSGGNTDYNTPFTSRLSINKDNMKSQVFFKMNSLQSNDTAIYYCARALTYYDYEFAYWGQGTLVTVSA

SEQ ID NO: 410 - protein, 119 aa, Artificial Sequence
  Variable HC	S074P
QVQLKQSGPGLVQPSQSLSITCTVSGFSLTNYGVHWVRQSPGKGLEWLGVIWSGGNTDYNTPFTSRLSINKDNPKSQVFFKMNSLQSNDTAIYYCARALTYYDYEFAYWGQGTLVTVSA

SEQ ID NO: 411 - protein, 119 aa, Artificial Sequence
  Variable HC	S074T
QVQLKQSGPGLVQPSQSLSITCTVSGFSLTNYGVHWVRQSPGKGLEWLGVIWSGGNTDYNTPFTSRLSINKDNTKSQVFFKMNSLQSNDTAIYYCARALTYYDYEFAYWGQGTLVTVSA

SEQ ID NO: 412 - protein, 119 aa, Artificial Sequence
  Variable HC	S074V
QVQLKQSGPGLVQPSQSLSITCTVSGFSLTNYGVHWVRQSPGKGLEWLGVIWSGGNTDYNTPFTSRLSINKDNVKSQVFFKMNSLQSNDTAIYYCARALTYYDYEFAYWGQGTLVTVSA

SEQ ID NO: 413 - protein, 119 aa, Artificial Sequence
  Variable HC	S074Y
QVQLKQSGPGLVQPSQSLSITCTVSGFSLTNYGVHWVRQSPGKGLEWLGVIWSGGNTDYNTPFTSRLSINKDNYKSQVFFKMNSLQSNDTAIYYCARALTYYDYEFAYWGQGTLVTVSA

SEQ ID NO: 414 - protein, 119 aa, Artificial Sequence
  Variable HC	K075H
QVQLKQSGPGLVQPSQSLSITCTVSGFSLTNYGVHWVRQSPGKGLEWLGVIWSGGNTDYNTPFTSRLSINKDNSHSQVFFKMNSLQSNDTAIYYCARALTYYDYEFAYWGQGTLVTVSA

SEQ ID NO: 415 - protein, 119 aa, Artificial Sequence
  Variable HC	K075R
QVQLKQSGPGLVQPSQSLSITCTVSGFSLTNYGVHWVRQSPGKGLEWLGVIWSGGNTDYNTPFTSRLSINKDNSRSQVFFKMNSLQSNDTAIYYCARALTYYDYEFAYWGQGTLVTVSA

SEQ ID NO: 416 - protein, 119 aa, Artificial Sequence
  Variable HC	K075L
QVQLKQSGPGLVQPSQSLSITCTVSGFSLTNYGVHWVRQSPGKGLEWLGVIWSGGNTDYNTPFTSRLSINKDNSLSQVFFKMNSLQSNDTAIYYCARALTYYDYEFAYWGQGTLVTVSA

SEQ ID NO: 417 - protein, 119 aa, Artificial Sequence
  Variable HC	K075A
QVQLKQSGPGLVQPSQSLSITCTVSGFSLTNYGVHWVRQSPGKGLEWLGVIWSGGNTDYNTPFTSRLSINKDNSASQVFFKMNSLQSNDTAIYYCARALTYYDYEFAYWGQGTLVTVSA

SEQ ID NO: 418 - protein, 119 aa, Artificial Sequence
  Variable HC	K075C
QVQLKQSGPGLVQPSQSLSITCTVSGFSLTNYGVHWVRQSPGKGLEWLGVIWSGGNTDYNTPFTSRLSINKDNSCSQVFFKMNSLQSNDTAIYYCARALTYYDYEFAYWGQGTLVTVSA

SEQ ID NO: 419 - protein, 119 aa, Artificial Sequence
  Variable HC	K075E
QVQLKQSGPGLVQPSQSLSITCTVSGFSLTNYGVHWVRQSPGKGLEWLGVIWSGGNTDYNTPFTSRLSINKDNSESQVFFKMNSLQSNDTAIYYCARALTYYDYEFAYWGQGTLVTVSA

SEQ ID NO: 420 - protein, 119 aa, Artificial Sequence
  Variable HC	K075F
QVQLKQSGPGLVQPSQSLSITCTVSGFSLTNYGVHWVRQSPGKGLEWLGVIWSGGNTDYNTPFTSRLSINKDNSFSQVFFKMNSLQSNDTAIYYCARALTYYDYEFAYWGQGTLVTVSA

SEQ ID NO: 421 - protein, 119 aa, Artificial Sequence
  Variable HC	K075M
QVQLKQSGPGLVQPSQSLSITCTVSGFSLTNYGVHWVRQSPGKGLEWLGVIWSGGNTDYNTPFTSRLSINKDNSMSQVFFKMNSLQSNDTAIYYCARALTYYDYEFAYWGQGTLVTVSA

SEQ ID NO: 422 - protein, 119 aa, Artificial Sequence
  Variable HC	K075Q
QVQLKQSGPGLVQPSQSLSITCTVSGFSLTNYGVHWVRQSPGKGLEWLGVIWSGGNTDYNTPFTSRLSINKDNSQSQVFFKMNSLQSNDTAIYYCARALTYYDYEFAYWGQGTLVTVSA

SEQ ID NO: 423 - protein, 119 aa, Artificial Sequence
  Variable HC	K075T
QVQLKQSGPGLVQPSQSLSITCTVSGFSLTNYGVHWVRQSPGKGLEWLGVIWSGGNTDYNTPFTSRLSINKDNSTSQVFFKMNSLQSNDTAIYYCARALTYYDYEFAYWGQGTLVTVSA

SEQ ID NO: 424 - protein, 119 aa, Artificial Sequence
  Variable HC	K075V
QVQLKQSGPGLVQPSQSLSITCTVSGFSLTNYGVHWVRQSPGKGLEWLGVIWSGGNTDYNTPFTSRLSINKDNSVSQVFFKMNSLQSNDTAIYYCARALTYYDYEFAYWGQGTLVTVSA

SEQ ID NO: 425 - protein, 119 aa, Artificial Sequence
  Variable HC	K075W
QVQLKQSGPGLVQPSQSLSITCTVSGFSLTNYGVHWVRQSPGKGLEWLGVIWSGGNTDYNTPFTSRLSINKDNSWSQVFFKMNSLQSNDTAIYYCARALTYYDYEFAYWGQGTLVTVSA

SEQ ID NO: 426 - protein, 119 aa, Artificial Sequence
  Variable HC	K075Y
QVQLKQSGPGLVQPSQSLSITCTVSGFSLTNYGVHWVRQSPGKGLEWLGVIWSGGNTDYNTPFTSRLSINKDNSYSQVFFKMNSLQSNDTAIYYCARALTYYDYEFAYWGQGTLVTVSA

SEQ ID NO: 427 - protein, 119 aa, Artificial Sequence
  Variable HC	S076H
QVQLKQSGPGLVQPSQSLSITCTVSGFSLTNYGVHWVRQSPGKGLEWLGVIWSGGNTDYNTPFTSRLSINKDNSKHQVFFKMNSLQSNDTAIYYCARALTYYDYEFAYWGQGTLVTVSA

SEQ ID NO: 428 - protein, 119 aa, Artificial Sequence
  Variable HC	S076R
QVQLKQSGPGLVQPSQSLSITCTVSGFSLTNYGVHWVRQSPGKGLEWLGVIWSGGNTDYNTPFTSRLSINKDNSKRQVFFKMNSLQSNDTAIYYCARALTYYDYEFAYWGQGTLVTVSA

SEQ ID NO: 429 - protein, 119 aa, Artificial Sequence
  Variable HC	S076L
QVQLKQSGPGLVQPSQSLSITCTVSGFSLTNYGVHWVRQSPGKGLEWLGVIWSGGNTDYNTPFTSRLSINKDNSKLQVFFKMNSLQSNDTAIYYCARALTYYDYEFAYWGQGTLVTVSA

SEQ ID NO: 430 - protein, 119 aa, Artificial Sequence
  Variable HC	S076A
QVQLKQSGPGLVQPSQSLSITCTVSGFSLTNYGVHWVRQSPGKGLEWLGVIWSGGNTDYNTPFTSRLSINKDNSKAQVFFKMNSLQSNDTAIYYCARALTYYDYEFAYWGQGTLVTVSA

SEQ ID NO: 431 - protein, 119 aa, Artificial Sequence
  Variable HC	S076C
QVQLKQSGPGLVQPSQSLSITCTVSGFSLTNYGVHWVRQSPGKGLEWLGVIWSGGNTDYNTPFTSRLSINKDNSKCQVFFKMNSLQSNDTAIYYCARALTYYDYEFAYWGQGTLVTVSA

SEQ ID NO: 432 - protein, 119 aa, Artificial Sequence
  Variable HC	S076D
QVQLKQSGPGLVQPSQSLSITCTVSGFSLTNYGVHWVRQSPGKGLEWLGVIWSGGNTDYNTPFTSRLSINKDNSKDQVFFKMNSLQSNDTAIYYCARALTYYDYEFAYWGQGTLVTVSA

SEQ ID NO: 433 - protein, 119 aa, Artificial Sequence
  Variable HC	S076E
QVQLKQSGPGLVQPSQSLSITCTVSGFSLTNYGVHWVRQSPGKGLEWLGVIWSGGNTDYNTPFTSRLSINKDNSKEQVFFKMNSLQSNDTAIYYCARALTYYDYEFAYWGQGTLVTVSA

SEQ ID NO: 434 - protein, 119 aa, Artificial Sequence
  Variable HC	S076F
QVQLKQSGPGLVQPSQSLSITCTVSGFSLTNYGVHWVRQSPGKGLEWLGVIWSGGNTDYNTPFTSRLSINKDNSKFQVFFKMNSLQSNDTAIYYCARALTYYDYEFAYWGQGTLVTVSA

SEQ ID NO: 435 - protein, 119 aa, Artificial Sequence
  Variable HC	S076M
QVQLKQSGPGLVQPSQSLSITCTVSGFSLTNYGVHWVRQSPGKGLEWLGVIWSGGNTDYNTPFTSRLSINKDNSKMQVFFKMNSLQSNDTAIYYCARALTYYDYEFAYWGQGTLVTVSA

SEQ ID NO: 436 - protein, 119 aa, Artificial Sequence
  Variable HC	S076P
QVQLKQSGPGLVQPSQSLSITCTVSGFSLTNYGVHWVRQSPGKGLEWLGVIWSGGNTDYNTPFTSRLSINKDNSKPQVFFKMNSLQSNDTAIYYCARALTYYDYEFAYWGQGTLVTVSA

SEQ ID NO: 437 - protein, 119 aa, Artificial Sequence
  Variable HC	S076Q
QVQLKQSGPGLVQPSQSLSITCTVSGFSLTNYGVHWVRQSPGKGLEWLGVIWSGGNTDYNTPFTSRLSINKDNSKQQVFFKMNSLQSNDTAIYYCARALTYYDYEFAYWGQGTLVTVSA

SEQ ID NO: 438 - protein, 119 aa, Artificial Sequence
  Variable HC	S076T
QVQLKQSGPGLVQPSQSLSITCTVSGFSLTNYGVHWVRQSPGKGLEWLGVIWSGGNTDYNTPFTSRLSINKDNSKTQVFFKMNSLQSNDTAIYYCARALTYYDYEFAYWGQGTLVTVSA

SEQ ID NO: 439 - protein, 119 aa, Artificial Sequence
  Variable HC	S076Y
QVQLKQSGPGLVQPSQSLSITCTVSGFSLTNYGVHWVRQSPGKGLEWLGVIWSGGNTDYNTPFTSRLSINKDNSKYQVFFKMNSLQSNDTAIYYCARALTYYDYEFAYWGQGTLVTVSA

SEQ ID NO: 440 - protein, 119 aa, Artificial Sequence
  Variable HC	Q077H
QVQLKQSGPGLVQPSQSLSITCTVSGFSLTNYGVHWVRQSPGKGLEWLGVIWSGGNTDYNTPFTSRLSINKDNSKSHVFFKMNSLQSNDTAIYYCARALTYYDYEFAYWGQGTLVTVSA

SEQ ID NO: 441 - protein, 119 aa, Artificial Sequence
  Variable HC	Q077R
QVQLKQSGPGLVQPSQSLSITCTVSGFSLTNYGVHWVRQSPGKGLEWLGVIWSGGNTDYNTPFTSRLSINKDNSKSRVFFKMNSLQSNDTAIYYCARALTYYDYEFAYWGQGTLVTVSA

SEQ ID NO: 442 - protein, 119 aa, Artificial Sequence
  Variable HC	Q077L
QVQLKQSGPGLVQPSQSLSITCTVSGFSLTNYGVHWVRQSPGKGLEWLGVIWSGGNTDYNTPFTSRLSINKDNSKSLVFFKMNSLQSNDTAIYYCARALTYYDYEFAYWGQGTLVTVSA

SEQ ID NO: 443 - protein, 119 aa, Artificial Sequence
  Variable HC	Q077A
QVQLKQSGPGLVQPSQSLSITCTVSGFSLTNYGVHWVRQSPGKGLEWLGVIWSGGNTDYNTPFTSRLSINKDNSKSAVFFKMNSLQSNDTAIYYCARALTYYDYEFAYWGQGTLVTVSA

SEQ ID NO: 444 - protein, 119 aa, Artificial Sequence
  Variable HC	Q077E
QVQLKQSGPGLVQPSQSLSITCTVSGFSLTNYGVHWVRQSPGKGLEWLGVIWSGGNTDYNTPFTSRLSINKDNSKSEVFFKMNSLQSNDTAIYYCARALTYYDYEFAYWGQGTLVTVSA

SEQ ID NO: 445 - protein, 119 aa, Artificial Sequence
  Variable HC	Q077G
QVQLKQSGPGLVQPSQSLSITCTVSGFSLTNYGVHWVRQSPGKGLEWLGVIWSGGNTDYNTPFTSRLSINKDNSKSGVFFKMNSLQSNDTAIYYCARALTYYDYEFAYWGQGTLVTVSA

SEQ ID NO: 446 - protein, 119 aa, Artificial Sequence
  Variable HC	Q077I
QVQLKQSGPGLVQPSQSLSITCTVSGFSLTNYGVHWVRQSPGKGLEWLGVIWSGGNTDYNTPFTSRLSINKDNSKSIVFFKMNSLQSNDTAIYYCARALTYYDYEFAYWGQGTLVTVSA

SEQ ID NO: 447 - protein, 119 aa, Artificial Sequence
  Variable HC	Q077M
QVQLKQSGPGLVQPSQSLSITCTVSGFSLTNYGVHWVRQSPGKGLEWLGVIWSGGNTDYNTPFTSRLSINKDNSKSMVFFKMNSLQSNDTAIYYCARALTYYDYEFAYWGQGTLVTVSA

SEQ ID NO: 448 - protein, 119 aa, Artificial Sequence
  Variable HC	Q077N
QVQLKQSGPGLVQPSQSLSITCTVSGFSLTNYGVHWVRQSPGKGLEWLGVIWSGGNTDYNTPFTSRLSINKDNSKSNVFFKMNSLQSNDTAIYYCARALTYYDYEFAYWGQGTLVTVSA

SEQ ID NO: 449 - protein, 119 aa, Artificial Sequence
  Variable HC	Q077S
QVQLKQSGPGLVQPSQSLSITCTVSGFSLTNYGVHWVRQSPGKGLEWLGVIWSGGNTDYNTPFTSRLSINKDNSKSSVFFKMNSLQSNDTAIYYCARALTYYDYEFAYWGQGTLVTVSA

SEQ ID NO: 450 - protein, 119 aa, Artificial Sequence
  Variable HC	Q077V
QVQLKQSGPGLVQPSQSLSITCTVSGFSLTNYGVHWVRQSPGKGLEWLGVIWSGGNTDYNTPFTSRLSINKDNSKSVVFFKMNSLQSNDTAIYYCARALTYYDYEFAYWGQGTLVTVSA

SEQ ID NO: 451 - protein, 119 aa, Artificial Sequence
  Variable HC	Q077W
QVQLKQSGPGLVQPSQSLSITCTVSGFSLTNYGVHWVRQSPGKGLEWLGVIWSGGNTDYNTPFTSRLSINKDNSKSWVFFKMNSLQSNDTAIYYCARALTYYDYEFAYWGQGTLVTVSA

SEQ ID NO: 452 - protein, 119 aa, Artificial Sequence
  Variable HC	Q077Y
QVQLKQSGPGLVQPSQSLSITCTVSGFSLTNYGVHWVRQSPGKGLEWLGVIWSGGNTDYNTPFTSRLSINKDNSKSYVFFKMNSLQSNDTAIYYCARALTYYDYEFAYWGQGTLVTVSA

SEQ ID NO: 453 - protein, 119 aa, Artificial Sequence
  Variable HC	Y093H
QVQLKQSGPGLVQPSQSLSITCTVSGFSLTNYGVHWVRQSPGKGLEWLGVIWSGGNTDYNTPFTSRLSINKDNSKSQVFFKMNSLQSNDTAIHYCARALTYYDYEFAYWGQGTLVTVSA

SEQ ID NO: 454 - protein, 119 aa, Artificial Sequence
  Variable HC	Y093V
QVQLKQSGPGLVQPSQSLSITCTVSGFSLTNYGVHWVRQSPGKGLEWLGVIWSGGNTDYNTPFTSRLSINKDNSKSQVFFKMNSLQSNDTAIVYCARALTYYDYEFAYWGQGTLVTVSA

SEQ ID NO: 455 - protein, 119 aa, Artificial Sequence
  Variable HC	Y093W
QVQLKQSGPGLVQPSQSLSITCTVSGFSLTNYGVHWVRQSPGKGLEWLGVIWSGGNTDYNTPFTSRLSINKDNSKSQVFFKMNSLQSNDTAIWYCARALTYYDYEFAYWGQGTLVTVSA

SEQ ID NO: 456 - protein, 119 aa, Artificial Sequence
  Variable HC	Y094R
QVQLKQSGPGLVQPSQSLSITCTVSGFSLTNYGVHWVRQSPGKGLEWLGVIWSGGNTDYNTPFTSRLSINKDNSKSQVFFKMNSLQSNDTAIYRCARALTYYDYEFAYWGQGTLVTVSA

SEQ ID NO: 457 - protein, 119 aa, Artificial Sequence
  Variable HC	Y094L
QVQLKQSGPGLVQPSQSLSITCTVSGFSLTNYGVHWVRQSPGKGLEWLGVIWSGGNTDYNTPFTSRLSINKDNSKSQVFFKMNSLQSNDTAIYLCARALTYYDYEFAYWGQGTLVTVSA

SEQ ID NO: 458 - protein, 119 aa, Artificial Sequence
  Variable HC	R097H
QVQLKQSGPGLVQPSQSLSITCTVSGFSLTNYGVHWVRQSPGKGLEWLGVIWSGGNTDYNTPFTSRLSINKDNSKSQVFFKMNSLQSNDTAIYYCAHALTYYDYEFAYWGQGTLVTVSA

SEQ ID NO: 459 - protein, 119 aa, Artificial Sequence
  Variable HC	R097W
QVQLKQSGPGLVQPSQSLSITCTVSGFSLTNYGVHWVRQSPGKGLEWLGVIWSGGNTDYNTPFTSRLSINKDNSKSQVFFKMNSLQSNDTAIYYCAWALTYYDYEFAYWGQGTLVTVSA

SEQ ID NO: 460 - protein, 119 aa, Artificial Sequence
  Variable HC	A098P
QVQLKQSGPGLVQPSQSLSITCTVSGFSLTNYGVHWVRQSPGKGLEWLGVIWSGGNTDYNTPFTSRLSINKDNSKSQVFFKMNSLQSNDTAIYYCARPLTYYDYEFAYWGQGTLVTVSA

SEQ ID NO: 461 - protein, 119 aa, Artificial Sequence
  Variable HC	L099N
QVQLKQSGPGLVQPSQSLSITCTVSGFSLTNYGVHWVRQSPGKGLEWLGVIWSGGNTDYNTPFTSRLSINKDNSKSQVFFKMNSLQSNDTAIYYCARANTYYDYEFAYWGQGTLVTVSA

SEQ ID NO: 462 - protein, 119 aa, Artificial Sequence
  Variable HC	L099W
QVQLKQSGPGLVQPSQSLSITCTVSGFSLTNYGVHWVRQSPGKGLEWLGVIWSGGNTDYNTPFTSRLSINKDNSKSQVFFKMNSLQSNDTAIYYCARAWTYYDYEFAYWGQGTLVTVSA

SEQ ID NO: 463 - protein, 119 aa, Artificial Sequence
  Variable HC	T100H
QVQLKQSGPGLVQPSQSLSITCTVSGFSLTNYGVHWVRQSPGKGLEWLGVIWSGGNTDYNTPFTSRLSINKDNSKSQVFFKMNSLQSNDTAIYYCARALHYYDYEFAYWGQGTLVTVSA

SEQ ID NO: 464 - protein, 119 aa, Artificial Sequence
  Variable HC	T100L
QVQLKQSGPGLVQPSQSLSITCTVSGFSLTNYGVHWVRQSPGKGLEWLGVIWSGGNTDYNTPFTSRLSINKDNSKSQVFFKMNSLQSNDTAIYYCARALLYYDYEFAYWGQGTLVTVSA

SEQ ID NO: 465 - protein, 119 aa, Artificial Sequence
  Variable HC	T100A
QVQLKQSGPGLVQPSQSLSITCTVSGFSLTNYGVHWVRQSPGKGLEWLGVIWSGGNTDYNTPFTSRLSINKDNSKSQVFFKMNSLQSNDTAIYYCARALAYYDYEFAYWGQGTLVTVSA

SEQ ID NO: 466 - protein, 119 aa, Artificial Sequence
  Variable HC	T100D
QVQLKQSGPGLVQPSQSLSITCTVSGFSLTNYGVHWVRQSPGKGLEWLGVIWSGGNTDYNTPFTSRLSINKDNSKSQVFFKMNSLQSNDTAIYYCARALDYYDYEFAYWGQGTLVTVSA

SEQ ID NO: 467 - protein, 119 aa, Artificial Sequence
  Variable HC	T100I
QVQLKQSGPGLVQPSQSLSITCTVSGFSLTNYGVHWVRQSPGKGLEWLGVIWSGGNTDYNTPFTSRLSINKDNSKSQVFFKMNSLQSNDTAIYYCARALIYYDYEFAYWGQGTLVTVSA

SEQ ID NO: 468 - protein, 119 aa, Artificial Sequence
  Variable HC	T100N
QVQLKQSGPGLVQPSQSLSITCTVSGFSLTNYGVHWVRQSPGKGLEWLGVIWSGGNTDYNTPFTSRLSINKDNSKSQVFFKMNSLQSNDTAIYYCARALNYYDYEFAYWGQGTLVTVSA

SEQ ID NO: 469 - protein, 119 aa, Artificial Sequence
  Variable HC	T100P
QVQLKQSGPGLVQPSQSLSITCTVSGFSLTNYGVHWVRQSPGKGLEWLGVIWSGGNTDYNTPFTSRLSINKDNSKSQVFFKMNSLQSNDTAIYYCARALPYYDYEFAYWGQGTLVTVSA

SEQ ID NO: 470 - protein, 119 aa, Artificial Sequence
  Variable HC	T100Q
QVQLKQSGPGLVQPSQSLSITCTVSGFSLTNYGVHWVRQSPGKGLEWLGVIWSGGNTDYNTPFTSRLSINKDNSKSQVFFKMNSLQSNDTAIYYCARALQYYDYEFAYWGQGTLVTVSA

SEQ ID NO: 471 - protein, 119 aa, Artificial Sequence
  Variable HC	T100S
QVQLKQSGPGLVQPSQSLSITCTVSGFSLTNYGVHWVRQSPGKGLEWLGVIWSGGNTDYNTPFTSRLSINKDNSKSQVFFKMNSLQSNDTAIYYCARALSYYDYEFAYWGQGTLVTVSA

SEQ ID NO: 472 - protein, 119 aa, Artificial Sequence
  Variable HC	T100V
QVQLKQSGPGLVQPSQSLSITCTVSGFSLTNYGVHWVRQSPGKGLEWLGVIWSGGNTDYNTPFTSRLSINKDNSKSQVFFKMNSLQSNDTAIYYCARALVYYDYEFAYWGQGTLVTVSA

SEQ ID NO: 473 - protein, 119 aa, Artificial Sequence
  Variable HC T100Y
QVQLKQSGPGLVQPSQSLSITCTVSGFSLTNYGVHWVRQSPGKGLEWLGVIWSGGNTDYNTPFTSRLSINKDNSKSQVFFKMNSLQSNDTAIYYCARALYYYDYEFAYWGQGTLVTVSA

SEQ ID NO: 474 - protein, 119 aa, Artificial Sequence
  Variable HC	Y101H
QVQLKQSGPGLVQPSQSLSITCTVSGFSLTNYGVHWVRQSPGKGLEWLGVIWSGGNTDYNTPFTSRLSINKDNSKSQVFFKMNSLQSNDTAIYYCARALTHYDYEFAYWGQGTLVTVSA

SEQ ID NO: 475 - protein, 119 aa, Artificial Sequence
  Variable HC	Y101E
QVQLKQSGPGLVQPSQSLSITCTVSGFSLTNYGVHWVRQSPGKGLEWLGVIWSGGNTDYNTPFTSRLSINKDNSKSQVFFKMNSLQSNDTAIYYCARALTEYDYEFAYWGQGTLVTVSA

SEQ ID NO: 476 - protein, 119 aa, Artificial Sequence
  Variable HC	Y101F
QVQLKQSGPGLVQPSQSLSITCTVSGFSLTNYGVHWVRQSPGKGLEWLGVIWSGGNTDYNTPFTSRLSINKDNSKSQVFFKMNSLQSNDTAIYYCARALTFYDYEFAYWGQGTLVTVSA

SEQ ID NO: 477 - protein, 119 aa, Artificial Sequence
  Variable HC	Y101M
QVQLKQSGPGLVQPSQSLSITCTVSGFSLTNYGVHWVRQSPGKGLEWLGVIWSGGNTDYNTPFTSRLSINKDNSKSQVFFKMNSLQSNDTAIYYCARALTMYDYEFAYWGQGTLVTVSA

SEQ ID NO: 478 - protein, 119 aa, Artificial Sequence
  Variable HC	Y101W
QVQLKQSGPGLVQPSQSLSITCTVSGFSLTNYGVHWVRQSPGKGLEWLGVIWSGGNTDYNTPFTSRLSINKDNSKSQVFFKMNSLQSNDTAIYYCARALTWYDYEFAYWGQGTLVTVSA

SEQ ID NO: 479 - protein, 119 aa, Artificial Sequence
  Variable HC	Y102R
QVQLKQSGPGLVQPSQSLSITCTVSGFSLTNYGVHWVRQSPGKGLEWLGVIWSGGNTDYNTPFTSRLSINKDNSKSQVFFKMNSLQSNDTAIYYCARALTYRDYEFAYWGQGTLVTVSA

SEQ ID NO: 480 - protein, 119 aa, Artificial Sequence
  Variable HC	Y102C
QVQLKQSGPGLVQPSQSLSITCTVSGFSLTNYGVHWVRQSPGKGLEWLGVIWSGGNTDYNTPFTSRLSINKDNSKSQVFFKMNSLQSNDTAIYYCARALTYCDYEFAYWGQGTLVTVSA

SEQ ID NO: 481 - protein, 119 aa, Artificial Sequence
  Variable HC	Y102D
QVQLKQSGPGLVQPSQSLSITCTVSGFSLTNYGVHWVRQSPGKGLEWLGVIWSGGNTDYNTPFTSRLSINKDNSKSQVFFKMNSLQSNDTAIYYCARALTYDDYEFAYWGQGTLVTVSA

SEQ ID NO: 482 - protein, 119 aa, Artificial Sequence
  Variable HC	Y102I
QVQLKQSGPGLVQPSQSLSITCTVSGFSLTNYGVHWVRQSPGKGLEWLGVIWSGGNTDYNTPFTSRLSINKDNSKSQVFFKMNSLQSNDTAIYYCARALTYIDYEFAYWGQGTLVTVSA

SEQ ID NO: 483 - protein, 119 aa, Artificial Sequence
  Variable HC	Y102N
QVQLKQSGPGLVQPSQSLSITCTVSGFSLTNYGVHWVRQSPGKGLEWLGVIWSGGNTDYNTPFTSRLSINKDNSKSQVFFKMNSLQSNDTAIYYCARALTYNDYEFAYWGQGTLVTVSA

SEQ ID NO: 484 - protein, 119 aa, Artificial Sequence
  Variable HC	Y102W
QVQLKQSGPGLVQPSQSLSITCTVSGFSLTNYGVHWVRQSPGKGLEWLGVIWSGGNTDYNTPFTSRLSINKDNSKSQVFFKMNSLQSNDTAIYYCARALTYWDYEFAYWGQGTLVTVSA

SEQ ID NO: 485 - protein, 119 aa, Artificial Sequence
  Variable HC	D103R
QVQLKQSGPGLVQPSQSLSITCTVSGFSLTNYGVHWVRQSPGKGLEWLGVIWSGGNTDYNTPFTSRLSINKDNSKSQVFFKMNSLQSNDTAIYYCARALTYYRYEFAYWGQGTLVTVSA

SEQ ID NO: 486 - protein, 119 aa, Artificial Sequence
  Variable HC	D103L
QVQLKQSGPGLVQPSQSLSITCTVSGFSLTNYGVHWVRQSPGKGLEWLGVIWSGGNTDYNTPFTSRLSINKDNSKSQVFFKMNSLQSNDTAIYYCARALTYYLYEFAYWGQGTLVTVSA

SEQ ID NO: 487 - protein, 119 aa, Artificial Sequence
  Variable HC	D103A
QVQLKQSGPGLVQPSQSLSITCTVSGFSLTNYGVHWVRQSPGKGLEWLGVIWSGGNTDYNTPFTSRLSINKDNSKSQVFFKMNSLQSNDTAIYYCARALTYYAYEFAYWGQGTLVTVSA

SEQ ID NO: 488 - protein, 119 aa, Artificial Sequence
  Variable HC	D103C
QVQLKQSGPGLVQPSQSLSITCTVSGFSLTNYGVHWVRQSPGKGLEWLGVIWSGGNTDYNTPFTSRLSINKDNSKSQVFFKMNSLQSNDTAIYYCARALTYYCYEFAYWGQGTLVTVSA

SEQ ID NO: 489 - protein, 119 aa, Artificial Sequence
  Variable HC	D103I
QVQLKQSGPGLVQPSQSLSITCTVSGFSLTNYGVHWVRQSPGKGLEWLGVIWSGGNTDYNTPFTSRLSINKDNSKSQVFFKMNSLQSNDTAIYYCARALTYYIYEFAYWGQGTLVTVSA

SEQ ID NO: 490 - protein, 119 aa, Artificial Sequence
  Variable HC	D103P
QVQLKQSGPGLVQPSQSLSITCTVSGFSLTNYGVHWVRQSPGKGLEWLGVIWSGGNTDYNTPFTSRLSINKDNSKSQVFFKMNSLQSNDTAIYYCARALTYYPYEFAYWGQGTLVTVSA

SEQ ID NO: 491 - protein, 119 aa, Artificial Sequence
  Variable HC	D103Q
QVQLKQSGPGLVQPSQSLSITCTVSGFSLTNYGVHWVRQSPGKGLEWLGVIWSGGNTDYNTPFTSRLSINKDNSKSQVFFKMNSLQSNDTAIYYCARALTYYQYEFAYWGQGTLVTVSA

SEQ ID NO: 492 - protein, 119 aa, Artificial Sequence
  Variable HC	D103Y
QVQLKQSGPGLVQPSQSLSITCTVSGFSLTNYGVHWVRQSPGKGLEWLGVIWSGGNTDYNTPFTSRLSINKDNSKSQVFFKMNSLQSNDTAIYYCARALTYYYYEFAYWGQGTLVTVSA

SEQ ID NO: 493 - protein, 119 aa, Artificial Sequence
  Variable HC	Y104H
QVQLKQSGPGLVQPSQSLSITCTVSGFSLTNYGVHWVRQSPGKGLEWLGVIWSGGNTDYNTPFTSRLSINKDNSKSQVFFKMNSLQSNDTAIYYCARALTYYDHEFAYWGQGTLVTVSA

SEQ ID NO: 494 - protein, 119 aa, Artificial Sequence
  Variable HC	Y104L
QVQLKQSGPGLVQPSQSLSITCTVSGFSLTNYGVHWVRQSPGKGLEWLGVIWSGGNTDYNTPFTSRLSINKDNSKSQVFFKMNSLQSNDTAIYYCARALTYYDLEFAYWGQGTLVTVSA

SEQ ID NO: 495 - protein, 119 aa, Artificial Sequence
  Variable HC	Y104D
QVQLKQSGPGLVQPSQSLSITCTVSGFSLTNYGVHWVRQSPGKGLEWLGVIWSGGNTDYNTPFTSRLSINKDNSKSQVFFKMNSLQSNDTAIYYCARALTYYDDEFAYWGQGTLVTVSA

SEQ ID NO: 496 - protein, 119 aa, Artificial Sequence
  Variable HC	Y104F
QVQLKQSGPGLVQPSQSLSITCTVSGFSLTNYGVHWVRQSPGKGLEWLGVIWSGGNTDYNTPFTSRLSINKDNSKSQVFFKMNSLQSNDTAIYYCARALTYYDFEFAYWGQGTLVTVSA

SEQ ID NO: 497 - protein, 119 aa, Artificial Sequence
  Variable HC	Y104I
QVQLKQSGPGLVQPSQSLSITCTVSGFSLTNYGVHWVRQSPGKGLEWLGVIWSGGNTDYNTPFTSRLSINKDNSKSQVFFKMNSLQSNDTAIYYCARALTYYDIEFAYWGQGTLVTVSA

SEQ ID NO: 498 - protein, 119 aa, Artificial Sequence
  Variable HC	Y104M
QVQLKQSGPGLVQPSQSLSITCTVSGFSLTNYGVHWVRQSPGKGLEWLGVIWSGGNTDYNTPFTSRLSINKDNSKSQVFFKMNSLQSNDTAIYYCARALTYYDMEFAYWGQGTLVTVSA

SEQ ID NO: 499 - protein, 119 aa, Artificial Sequence
  Variable HC	Y104S
QVQLKQSGPGLVQPSQSLSITCTVSGFSLTNYGVHWVRQSPGKGLEWLGVIWSGGNTDYNTPFTSRLSINKDNSKSQVFFKMNSLQSNDTAIYYCARALTYYDSEFAYWGQGTLVTVSA

SEQ ID NO: 500 - protein, 119 aa, Artificial Sequence
  Variable HC	Y104V
QVQLKQSGPGLVQPSQSLSITCTVSGFSLTNYGVHWVRQSPGKGLEWLGVIWSGGNTDYNTPFTSRLSINKDNSKSQVFFKMNSLQSNDTAIYYCARALTYYDVEFAYWGQGTLVTVSA

SEQ ID NO: 501 - protein, 119 aa, Artificial Sequence
  Variable HC	E105H
QVQLKQSGPGLVQPSQSLSITCTVSGFSLTNYGVHWVRQSPGKGLEWLGVIWSGGNTDYNTPFTSRLSINKDNSKSQVFFKMNSLQSNDTAIYYCARALTYYDYHFAYWGQGTLVTVSA

SEQ ID NO: 502 - protein, 119 aa, Artificial Sequence
  Variable HC	E105T
QVQLKQSGPGLVQPSQSLSITCTVSGFSLTNYGVHWVRQSPGKGLEWLGVIWSGGNTDYNTPFTSRLSINKDNSKSQVFFKMNSLQSNDTAIYYCARALTYYDYTFAYWGQGTLVTVSA

SEQ ID NO: 503 - protein, 119 aa, Artificial Sequence
  Variable HC	F106L
QVQLKQSGPGLVQPSQSLSITCTVSGFSLTNYGVHWVRQSPGKGLEWLGVIWSGGNTDYNTPFTSRLSINKDNSKSQVFFKMNSLQSNDTAIYYCARALTYYDYELAYWGQGTLVTVSA

SEQ ID NO: 504 - protein, 119 aa, Artificial Sequence
  Variable HC	F106V
QVQLKQSGPGLVQPSQSLSITCTVSGFSLTNYGVHWVRQSPGKGLEWLGVIWSGGNTDYNTPFTSRLSINKDNSKSQVFFKMNSLQSNDTAIYYCARALTYYDYEVAYWGQGTLVTVSA

SEQ ID NO: 505 - protein, 119 aa, Artificial Sequence
  Variable HC	F106W
QVQLKQSGPGLVQPSQSLSITCTVSGFSLTNYGVHWVRQSPGKGLEWLGVIWSGGNTDYNTPFTSRLSINKDNSKSQVFFKMNSLQSNDTAIYYCARALTYYDYEWAYWGQGTLVTVSA

SEQ ID NO: 506 - protein, 119 aa, Artificial Sequence
  Variable HC	F106Y
QVQLKQSGPGLVQPSQSLSITCTVSGFSLTNYGVHWVRQSPGKGLEWLGVIWSGGNTDYNTPFTSRLSINKDNSKSQVFFKMNSLQSNDTAIYYCARALTYYDYEYAYWGQGTLVTVSA

SEQ ID NO: 507 - protein, 119 aa, Artificial Sequence
  Variable HC	A107K
QVQLKQSGPGLVQPSQSLSITCTVSGFSLTNYGVHWVRQSPGKGLEWLGVIWSGGNTDYNTPFTSRLSINKDNSKSQVFFKMNSLQSNDTAIYYCARALTYYDYEFKYWGQGTLVTVSA

SEQ ID NO: 508 - protein, 119 aa, Artificial Sequence
  Variable HC	A107H
QVQLKQSGPGLVQPSQSLSITCTVSGFSLTNYGVHWVRQSPGKGLEWLGVIWSGGNTDYNTPFTSRLSINKDNSKSQVFFKMNSLQSNDTAIYYCARALTYYDYEFHYWGQGTLVTVSA

SEQ ID NO: 509 - protein, 119 aa, Artificial Sequence
  Variable HC	A107R
QVQLKQSGPGLVQPSQSLSITCTVSGFSLTNYGVHWVRQSPGKGLEWLGVIWSGGNTDYNTPFTSRLSINKDNSKSQVFFKMNSLQSNDTAIYYCARALTYYDYEFRYWGQGTLVTVSA

SEQ ID NO: 510 - protein, 119 aa, Artificial Sequence
  Variable HC	A107L
QVQLKQSGPGLVQPSQSLSITCTVSGFSLTNYGVHWVRQSPGKGLEWLGVIWSGGNTDYNTPFTSRLSINKDNSKSQVFFKMNSLQSNDTAIYYCARALTYYDYEFLYWGQGTLVTVSA

SEQ ID NO: 511 - protein, 119 aa, Artificial Sequence
  Variable HC	A107C
QVQLKQSGPGLVQPSQSLSITCTVSGFSLTNYGVHWVRQSPGKGLEWLGVIWSGGNTDYNTPFTSRLSINKDNSKSQVFFKMNSLQSNDTAIYYCARALTYYDYEFCYWGQGTLVTVSA

SEQ ID NO: 512 - protein, 119 aa, Artificial Sequence
  Variable HC	A107D
QVQLKQSGPGLVQPSQSLSITCTVSGFSLTNYGVHWVRQSPGKGLEWLGVIWSGGNTDYNTPFTSRLSINKDNSKSQVFFKMNSLQSNDTAIYYCARALTYYDYEFDYWGQGTLVTVSA

SEQ ID NO: 513 - protein, 119 aa, Artificial Sequence
  Variable HC	A107E
QVQLKQSGPGLVQPSQSLSITCTVSGFSLTNYGVHWVRQSPGKGLEWLGVIWSGGNTDYNTPFTSRLSINKDNSKSQVFFKMNSLQSNDTAIYYCARALTYYDYEFEYWGQGTLVTVSA

SEQ ID NO: 514 - protein, 119 aa, Artificial Sequence
  Variable HC	A107G
QVQLKQSGPGLVQPSQSLSITCTVSGFSLTNYGVHWVRQSPGKGLEWLGVIWSGGNTDYNTPFTSRLSINKDNSKSQVFFKMNSLQSNDTAIYYCARALTYYDYEFGYWGQGTLVTVSA

SEQ ID NO: 515 - protein, 119 aa, Artificial Sequence
  Variable HC	A107N
QVQLKQSGPGLVQPSQSLSITCTVSGFSLTNYGVHWVRQSPGKGLEWLGVIWSGGNTDYNTPFTSRLSINKDNSKSQVFFKMNSLQSNDTAIYYCARALTYYDYEFNYWGQGTLVTVSA

SEQ ID NO: 516 - protein, 119 aa, Artificial Sequence
  Variable HC	A107S
QVQLKQSGPGLVQPSQSLSITCTVSGFSLTNYGVHWVRQSPGKGLEWLGVIWSGGNTDYNTPFTSRLSINKDNSKSQVFFKMNSLQSNDTAIYYCARALTYYDYEFSYWGQGTLVTVSA

SEQ ID NO: 517 - protein, 119 aa, Artificial Sequence
  Variable HC	A107T
QVQLKQSGPGLVQPSQSLSITCTVSGFSLTNYGVHWVRQSPGKGLEWLGVIWSGGNTDYNTPFTSRLSINKDNSKSQVFFKMNSLQSNDTAIYYCARALTYYDYEFTYWGQGTLVTVSA

SEQ ID NO: 518 - protein, 119 aa, Artificial Sequence
  Variable HC	A107Y
QVQLKQSGPGLVQPSQSLSITCTVSGFSLTNYGVHWVRQSPGKGLEWLGVIWSGGNTDYNTPFTSRLSINKDNSKSQVFFKMNSLQSNDTAIYYCARALTYYDYEFYYWGQGTLVTVSA

SEQ ID NO: 519 - protein, 119 aa, Artificial Sequence
  Variable HC	Y108K
QVQLKQSGPGLVQPSQSLSITCTVSGFSLTNYGVHWVRQSPGKGLEWLGVIWSGGNTDYNTPFTSRLSINKDNSKSQVFFKMNSLQSNDTAIYYCARALTYYDYEFAKWGQGTLVTVSA

SEQ ID NO: 520 - protein, 119 aa, Artificial Sequence
  Variable HC	Y108H
QVQLKQSGPGLVQPSQSLSITCTVSGFSLTNYGVHWVRQSPGKGLEWLGVIWSGGNTDYNTPFTSRLSINKDNSKSQVFFKMNSLQSNDTAIYYCARALTYYDYEFAHWGQGTLVTVSA

SEQ ID NO: 521 - protein, 119 aa, Artificial Sequence
  Variable HC	Y108R
QVQLKQSGPGLVQPSQSLSITCTVSGFSLTNYGVHWVRQSPGKGLEWLGVIWSGGNTDYNTPFTSRLSINKDNSKSQVFFKMNSLQSNDTAIYYCARALTYYDYEFARWGQGTLVTVSA

SEQ ID NO: 522 - protein, 119 aa, Artificial Sequence
  Variable HC	Y108L
QVQLKQSGPGLVQPSQSLSITCTVSGFSLTNYGVHWVRQSPGKGLEWLGVIWSGGNTDYNTPFTSRLSINKDNSKSQVFFKMNSLQSNDTAIYYCARALTYYDYEFALWGQGTLVTVSA

SEQ ID NO: 523 - protein, 119 aa, Artificial Sequence
  Variable HC	Y108C
QVQLKQSGPGLVQPSQSLSITCTVSGFSLTNYGVHWVRQSPGKGLEWLGVIWSGGNTDYNTPFTSRLSINKDNSKSQVFFKMNSLQSNDTAIYYCARALTYYDYEFACWGQGTLVTVSA

SEQ ID NO: 524 - protein, 119 aa, Artificial Sequence
  Variable HC	Y108F
QVQLKQSGPGLVQPSQSLSITCTVSGFSLTNYGVHWVRQSPGKGLEWLGVIWSGGNTDYNTPFTSRLSINKDNSKSQVFFKMNSLQSNDTAIYYCARALTYYDYEFAFWGQGTLVTVSA

SEQ ID NO: 525 - protein, 119 aa, Artificial Sequence
  Variable HC	Y108I
QVQLKQSGPGLVQPSQSLSITCTVSGFSLTNYGVHWVRQSPGKGLEWLGVIWSGGNTDYNTPFTSRLSINKDNSKSQVFFKMNSLQSNDTAIYYCARALTYYDYEFAIWGQGTLVTVSA

SEQ ID NO: 526 - protein, 119 aa, Artificial Sequence
  Variable HC	Y108N
QVQLKQSGPGLVQPSQSLSITCTVSGFSLTNYGVHWVRQSPGKGLEWLGVIWSGGNTDYNTPFTSRLSINKDNSKSQVFFKMNSLQSNDTAIYYCARALTYYDYEFANWGQGTLVTVSA

SEQ ID NO: 527 - protein, 119 aa, Artificial Sequence
  Variable HC	Y108S
QVQLKQSGPGLVQPSQSLSITCTVSGFSLTNYGVHWVRQSPGKGLEWLGVIWSGGNTDYNTPFTSRLSINKDNSKSQVFFKMNSLQSNDTAIYYCARALTYYDYEFASWGQGTLVTVSA

SEQ ID NO: 528 - protein, 119 aa, Artificial Sequence
  Variable HC	Y108T
QVQLKQSGPGLVQPSQSLSITCTVSGFSLTNYGVHWVRQSPGKGLEWLGVIWSGGNTDYNTPFTSRLSINKDNSKSQVFFKMNSLQSNDTAIYYCARALTYYDYEFATWGQGTLVTVSA

SEQ ID NO: 529 - protein, 119 aa, Artificial Sequence
  Variable HC	Y108V
QVQLKQSGPGLVQPSQSLSITCTVSGFSLTNYGVHWVRQSPGKGLEWLGVIWSGGNTDYNTPFTSRLSINKDNSKSQVFFKMNSLQSNDTAIYYCARALTYYDYEFAVWGQGTLVTVSA

SEQ ID NO: 530 - protein, 119 aa, Artificial Sequence
  Variable HC	Y108W
QVQLKQSGPGLVQPSQSLSITCTVSGFSLTNYGVHWVRQSPGKGLEWLGVIWSGGNTDYNTPFTSRLSINKDNSKSQVFFKMNSLQSNDTAIYYCARALTYYDYEFAWWGQGTLVTVSA

SEQ ID NO: 531 - protein, 119 aa, Artificial Sequence
  Variable HC	W109I
QVQLKQSGPGLVQPSQSLSITCTVSGFSLTNYGVHWVRQSPGKGLEWLGVIWSGGNTDYNTPFTSRLSINKDNSKSQVFFKMNSLQSNDTAIYYCARALTYYDYEFAYIGQGTLVTVSA

SEQ ID NO: 532 - protein, 119 aa, Artificial Sequence
  Variable HC	W109M
QVQLKQSGPGLVQPSQSLSITCTVSGFSLTNYGVHWVRQSPGKGLEWLGVIWSGGNTDYNTPFTSRLSINKDNSKSQVFFKMNSLQSNDTAIYYCARALTYYDYEFAYMGQGTLVTVSA

SEQ ID NO: 533 - protein, 119 aa, Artificial Sequence
  Variable HC	W109Y
QVQLKQSGPGLVQPSQSLSITCTVSGFSLTNYGVHWVRQSPGKGLEWLGVIWSGGNTDYNTPFTSRLSINKDNSKSQVFFKMNSLQSNDTAIYYCARALTYYDYEFAYYGQGTLVTVSA

SEQ ID NO: 534 - protein, 119 aa, Artificial Sequence
  Variable HC	G110R
QVQLKQSGPGLVQPSQSLSITCTVSGFSLTNYGVHWVRQSPGKGLEWLGVIWSGGNTDYNTPFTSRLSINKDNSKSQVFFKMNSLQSNDTAIYYCARALTYYDYEFAYWRQGTLVTVSA

SEQ ID NO: 535 - protein, 119 aa, Artificial Sequence
  Variable HC	G110A
QVQLKQSGPGLVQPSQSLSITCTVSGFSLTNYGVHWVRQSPGKGLEWLGVIWSGGNTDYNTPFTSRLSINKDNSKSQVFFKMNSLQSNDTAIYYCARALTYYDYEFAYWAQGTLVTVSA

SEQ ID NO: 536 - protein, 119 aa, Artificial Sequence
  Variable HC	G110M
QVQLKQSGPGLVQPSQSLSITCTVSGFSLTNYGVHWVRQSPGKGLEWLGVIWSGGNTDYNTPFTSRLSINKDNSKSQVFFKMNSLQSNDTAIYYCARALTYYDYEFAYWMQGTLVTVSA

SEQ ID NO: 537 - protein, 119 aa, Artificial Sequence
  Variable HC	G110P
QVQLKQSGPGLVQPSQSLSITCTVSGFSLTNYGVHWVRQSPGKGLEWLGVIWSGGNTDYNTPFTSRLSINKDNSKSQVFFKMNSLQSNDTAIYYCARALTYYDYEFAYWPQGTLVTVSA

SEQ ID NO: 538 - protein, 119 aa, Artificial Sequence
  Variable HC	G110T
QVQLKQSGPGLVQPSQSLSITCTVSGFSLTNYGVHWVRQSPGKGLEWLGVIWSGGNTDYNTPFTSRLSINKDNSKSQVFFKMNSLQSNDTAIYYCARALTYYDYEFAYWTQGTLVTVSA

SEQ ID NO: 539 - protein, 119 aa, Artificial Sequence
  Variable HC	Q111K
QVQLKQSGPGLVQPSQSLSITCTVSGFSLTNYGVHWVRQSPGKGLEWLGVIWSGGNTDYNTPFTSRLSINKDNSKSQVFFKMNSLQSNDTAIYYCARALTYYDYEFAYWGKGTLVTVSA

SEQ ID NO: 540 - protein, 119 aa, Artificial Sequence
  Variable HC	Q111H
QVQLKQSGPGLVQPSQSLSITCTVSGFSLTNYGVHWVRQSPGKGLEWLGVIWSGGNTDYNTPFTSRLSINKDNSKSQVFFKMNSLQSNDTAIYYCARALTYYDYEFAYWGHGTLVTVSA

SEQ ID NO: 541 - protein, 119 aa, Artificial Sequence
  Variable HC	Q111R
QVQLKQSGPGLVQPSQSLSITCTVSGFSLTNYGVHWVRQSPGKGLEWLGVIWSGGNTDYNTPFTSRLSINKDNSKSQVFFKMNSLQSNDTAIYYCARALTYYDYEFAYWGRGTLVTVSA

SEQ ID NO: 542 - protein, 119 aa, Artificial Sequence
  Variable HC	Q111L
QVQLKQSGPGLVQPSQSLSITCTVSGFSLTNYGVHWVRQSPGKGLEWLGVIWSGGNTDYNTPFTSRLSINKDNSKSQVFFKMNSLQSNDTAIYYCARALTYYDYEFAYWGLGTLVTVSA

SEQ ID NO: 543 - protein, 119 aa, Artificial Sequence
  Variable HC	Q111D
QVQLKQSGPGLVQPSQSLSITCTVSGFSLTNYGVHWVRQSPGKGLEWLGVIWSGGNTDYNTPFTSRLSINKDNSKSQVFFKMNSLQSNDTAIYYCARALTYYDYEFAYWGDGTLVTVSA

SEQ ID NO: 544 - protein, 119 aa, Artificial Sequence
  Variable HC	Q111E
QVQLKQSGPGLVQPSQSLSITCTVSGFSLTNYGVHWVRQSPGKGLEWLGVIWSGGNTDYNTPFTSRLSINKDNSKSQVFFKMNSLQSNDTAIYYCARALTYYDYEFAYWGEGTLVTVSA

SEQ ID NO: 545 - protein, 119 aa, Artificial Sequence
  Variable HC	Q111G
QVQLKQSGPGLVQPSQSLSITCTVSGFSLTNYGVHWVRQSPGKGLEWLGVIWSGGNTDYNTPFTSRLSINKDNSKSQVFFKMNSLQSNDTAIYYCARALTYYDYEFAYWGGGTLVTVSA

SEQ ID NO: 546 - protein, 119 aa, Artificial Sequence
  Variable HC	Q111M
QVQLKQSGPGLVQPSQSLSITCTVSGFSLTNYGVHWVRQSPGKGLEWLGVIWSGGNTDYNTPFTSRLSINKDNSKSQVFFKMNSLQSNDTAIYYCARALTYYDYEFAYWGMGTLVTVSA

SEQ ID NO: 547 - protein, 119 aa, Artificial Sequence
  Variable HC	Q111P
QVQLKQSGPGLVQPSQSLSITCTVSGFSLTNYGVHWVRQSPGKGLEWLGVIWSGGNTDYNTPFTSRLSINKDNSKSQVFFKMNSLQSNDTAIYYCARALTYYDYEFAYWGPGTLVTVSA

SEQ ID NO: 548 - protein, 119 aa, Artificial Sequence
  Variable HC	Q111S
QVQLKQSGPGLVQPSQSLSITCTVSGFSLTNYGVHWVRQSPGKGLEWLGVIWSGGNTDYNTPFTSRLSINKDNSKSQVFFKMNSLQSNDTAIYYCARALTYYDYEFAYWGSGTLVTVSA

SEQ ID NO: 549 - protein, 119 aa, Artificial Sequence
  Variable HC	Q111T
QVQLKQSGPGLVQPSQSLSITCTVSGFSLTNYGVHWVRQSPGKGLEWLGVIWSGGNTDYNTPFTSRLSINKDNSKSQVFFKMNSLQSNDTAIYYCARALTYYDYEFAYWGTGTLVTVSA

SEQ ID NO: 550 - protein, 119 aa, Artificial Sequence
  Variable HC	Q111W
QVQLKQSGPGLVQPSQSLSITCTVSGFSLTNYGVHWVRQSPGKGLEWLGVIWSGGNTDYNTPFTSRLSINKDNSKSQVFFKMNSLQSNDTAIYYCARALTYYDYEFAYWGWGTLVTVSA

SEQ ID NO: 551 - protein, 119 aa, Artificial Sequence
  Variable HC	Q111Y
QVQLKQSGPGLVQPSQSLSITCTVSGFSLTNYGVHWVRQSPGKGLEWLGVIWSGGNTDYNTPFTSRLSINKDNSKSQVFFKMNSLQSNDTAIYYCARALTYYDYEFAYWGYGTLVTVSA

SEQ ID NO: 552 - protein, 119 aa, Artificial Sequence
  Variable HC	G112A
QVQLKQSGPGLVQPSQSLSITCTVSGFSLTNYGVHWVRQSPGKGLEWLGVIWSGGNTDYNTPFTSRLSINKDNSKSQVFFKMNSLQSNDTAIYYCARALTYYDYEFAYWGQATLVTVSA

SEQ ID NO: 553 - protein, 119 aa, Artificial Sequence
  Variable HC	G112N
QVQLKQSGPGLVQPSQSLSITCTVSGFSLTNYGVHWVRQSPGKGLEWLGVIWSGGNTDYNTPFTSRLSINKDNSKSQVFFKMNSLQSNDTAIYYCARALTYYDYEFAYWGQNTLVTVSA

SEQ ID NO: 554 - protein, 119 aa, Artificial Sequence
  Variable HC	G112P
QVQLKQSGPGLVQPSQSLSITCTVSGFSLTNYGVHWVRQSPGKGLEWLGVIWSGGNTDYNTPFTSRLSINKDNSKSQVFFKMNSLQSNDTAIYYCARALTYYDYEFAYWGQPTLVTVSA

SEQ ID NO: 555 - protein, 119 aa, Artificial Sequence
  Variable HC	G112S
QVQLKQSGPGLVQPSQSLSITCTVSGFSLTNYGVHWVRQSPGKGLEWLGVIWSGGNTDYNTPFTSRLSINKDNSKSQVFFKMNSLQSNDTAIYYCARALTYYDYEFAYWGQSTLVTVSA

SEQ ID NO: 556 - protein, 119 aa, Artificial Sequence
  Variable HC	G112T
QVQLKQSGPGLVQPSQSLSITCTVSGFSLTNYGVHWVRQSPGKGLEWLGVIWSGGNTDYNTPFTSRLSINKDNSKSQVFFKMNSLQSNDTAIYYCARALTYYDYEFAYWGQTTLVTVSA

SEQ ID NO: 557 - protein, 119 aa, Artificial Sequence
  Variable HC	G112Y
QVQLKQSGPGLVQPSQSLSITCTVSGFSLTNYGVHWVRQSPGKGLEWLGVIWSGGNTDYNTPFTSRLSINKDNSKSQVFFKMNSLQSNDTAIYYCARALTYYDYEFAYWGQYTLVTVSA

SEQ ID NO: 558 - protein, 107 aa, Artificial Sequence
  Variable LC	D001W
WILLTQSPVILSVSPGERVSFSCRASQSIGTNIHWYQQRTNGSPRLLIKYASESISGIPSRFSGSGSGTDFTLSINSVESEDIADYYCQQNNNWPTTFGAGTKLELK

SEQ ID NO: 559 - protein, 107 aa, Artificial Sequence
  Variable LC I002C
DCLLTQSPVILSVSPGERVSFSCRASQSIGTNIHWYQQRTNGSPRLLIKYASESISGIPSRFSGSGSGTDFTLSINSVESEDIADYYCQQNNNWPTTFGAGTKLELK

SEQ ID NO: 560 - protein, 107 aa, Artificial Sequence
  Variable LC I002V
DVLLTQSPVILSVSPGERVSFSCRASQSIGTNIHWYQQRTNGSPRLLIKYASESISGIPSRFSGSGSGTDFTLSINSVESEDIADYYCQQNNNWPTTFGAGTKLELK

SEQ ID NO: 561 - protein, 107 aa, Artificial Sequence
  Variable LC I002W
DWLLTQSPVILSVSPGERVSFSCRASQSIGTNIHWYQQRTNGSPRLLIKYASESISGIPSRFSGSGSGTDFTLSINSVESEDIADYYCQQNNNWPTTFGAGTKLELK

SEQ ID NO: 562 - protein, 107 aa, Artificial Sequence
  Variable LC	L003D
DIDLTQSPVILSVSPGERVSFSCRASQSIGTNIHWYQQRTNGSPRLLIKYASESISGIPSRFSGSGSGTDFTLSINSVESEDIADYYCQQNNNWPTTFGAGTKLELK

SEQ ID NO: 563 - protein, 107 aa, Artificial Sequence
  Variable LC L003F
DIFLTQSPVILSVSPGERVSFSCRASQSIGTNIHWYQQRTNGSPRLLIKYASESISGIPSRFSGSGSGTDFTLSINSVESEDIADYYCQQNNNWPTTFGAGTKLELK

SEQ ID NO: 564 - protein, 107 aa, Artificial Sequence
  Variable LC L003G
DIGLTQSPVILSVSPGERVSFSCRASQSIGTNIHWYQQRTNGSPRLLIKYASESISGIPSRFSGSGSGTDFTLSINSVESEDIADYYCQQNNNWPTTFGAGTKLELK

SEQ ID NO: 565 - protein, 107 aa, Artificial Sequence
  Variable LC	L003S
DISLTQSPVILSVSPGERVSFSCRASQSIGTNIHWYQQRTNGSPRLLIKYASESISGIPSRFSGSGSGTDFTLSINSVESEDIADYYCQQNNNWPTTFGAGTKLELK

SEQ ID NO: 566 - protein, 107 aa, Artificial Sequence
  Variable LC L003T
DITLTQSPVILSVSPGERVSFSCRASQSIGTNIHWYQQRTNGSPRLLIKYASESISGIPSRFSGSGSGTDFTLSINSVESEDIADYYCQQNNNWPTTFGAGTKLELK

SEQ ID NO: 567 - protein, 107 aa, Artificial Sequence
  Variable LC	L003V
DIVLTQSPVILSVSPGERVSFSCRASQSIGTNIHWYQQRTNGSPRLLIKYASESISGIPSRFSGSGSGTDFTLSINSVESEDIADYYCQQNNNWPTTFGAGTKLELK

SEQ ID NO: 568 - protein, 107 aa, Artificial Sequence
  Variable LC	L003W
DIWLTQSPVILSVSPGERVSFSCRASQSIGTNIHWYQQRTNGSPRLLIKYASESISGIPSRFSGSGSGTDFTLSINSVESEDIADYYCQQNNNWPTTFGAGTKLELK

SEQ ID NO: 569 - protein, 107 aa, Artificial Sequence
  Variable LC	L003Y
DIYLTQSPVILSVSPGERVSFSCRASQSIGTNIHWYQQRTNGSPRLLIKYASESISGIPSRFSGSGSGTDFTLSINSVESEDIADYYCQQNNNWPTTFGAGTKLELK

SEQ ID NO: 570 - protein, 107 aa, Artificial Sequence
  Variable LC	L003R
DIRLTQSPVILSVSPGERVSFSCRASQSIGTNIHWYQQRTNGSPRLLIKYASESISGIPSRFSGSGSGTDFTLSINSVESEDIADYYCQQNNNWPTTFGAGTKLELK

SEQ ID NO: 571 - protein, 107 aa, Artificial Sequence
  Variable LC	L004C
DILCTQSPVILSVSPGERVSFSCRASQSIGTNIHWYQQRTNGSPRLLIKYASESISGIPSRFSGSGSGTDFTLSINSVESEDIADYYCQQNNNWPTTFGAGTKLELK

SEQ ID NO: 572 - protein, 107 aa, Artificial Sequence
  Variable LC L004E
DILETQSPVILSVSPGERVSFSCRASQSIGTNIHWYQQRTNGSPRLLIKYASESISGIPSRFSGSGSGTDFTLSINSVESEDIADYYCQQNNNWPTTFGAGTKLELK

SEQ ID NO: 573 - protein, 107 aa, Artificial Sequence
  Variable LC	L004F
DILFTQSPVILSVSPGERVSFSCRASQSIGTNIHWYQQRTNGSPRLLIKYASESISGIPSRFSGSGSGTDFTLSINSVESEDIADYYCQQNNNWPTTFGAGTKLELK

SEQ ID NO: 574 - protein, 107 aa, Artificial Sequence
  Variable LC	L004I
DILITQSPVILSVSPGERVSFSCRASQSIGTNIHWYQQRTNGSPRLLIKYASESISGIPSRFSGSGSGTDFTLSINSVESEDIADYYCQQNNNWPTTFGAGTKLELK

SEQ ID NO: 575 - protein, 107 aa, Artificial Sequence
  Variable LC L004P
DILPTQSPVILSVSPGERVSFSCRASQSIGTNIHWYQQRTNGSPRLLIKYASESISGIPSRFSGSGSGTDFTLSINSVESEDIADYYCQQNNNWPTTFGAGTKLELK

SEQ ID NO: 576 - protein, 107 aa, Artificial Sequence
  Variable LC L004S
DILSTQSPVILSVSPGERVSFSCRASQSIGTNIHWYQQRTNGSPRLLIKYASESISGIPSRFSGSGSGTDFTLSINSVESEDIADYYCQQNNNWPTTFGAGTKLELK

SEQ ID NO: 577 - protein, 107 aa, Artificial Sequence
  Variable LC L004T
DILTTQSPVILSVSPGERVSFSCRASQSIGTNIHWYQQRTNGSPRLLIKYASESISGIPSRFSGSGSGTDFTLSINSVESEDIADYYCQQNNNWPTTFGAGTKLELK

SEQ ID NO: 578 - protein, 107 aa, Artificial Sequence
  Variable LC L004V
DILVTQSPVILSVSPGERVSFSCRASQSIGTNIHWYQQRTNGSPRLLIKYASESISGIPSRFSGSGSGTDFTLSINSVESEDIADYYCQQNNNWPTTFGAGTKLELK

SEQ ID NO: 579 - protein, 107 aa, Artificial Sequence
  Variable LC L004W
DILWTQSPVILSVSPGERVSFSCRASQSIGTNIHWYQQRTNGSPRLLIKYASESISGIPSRFSGSGSGTDFTLSINSVESEDIADYYCQQNNNWPTTFGAGTKLELK

SEQ ID NO: 580 - protein, 107 aa, Artificial Sequence
  Variable LC L004K
DILKTQSPVILSVSPGERVSFSCRASQSIGTNIHWYQQRTNGSPRLLIKYASESISGIPSRFSGSGSGTDFTLSINSVESEDIADYYCQQNNNWPTTFGAGTKLELK

SEQ ID NO: 581 - protein, 107 aa, Artificial Sequence
  Variable LC	L004H
DILHTQSPVILSVSPGERVSFSCRASQSIGTNIHWYQQRTNGSPRLLIKYASESISGIPSRFSGSGSGTDFTLSINSVESEDIADYYCQQNNNWPTTFGAGTKLELK

SEQ ID NO: 582 - protein, 107 aa, Artificial Sequence
  Variable LC L004R
DILRTQSPVILSVSPGERVSFSCRASQSIGTNIHWYQQRTNGSPRLLIKYASESISGIPSRFSGSGSGTDFTLSINSVESEDIADYYCQQNNNWPTTFGAGTKLELK

SEQ ID NO: 583 - protein, 107 aa, Artificial Sequence
  Variable LC T005A
DILLAQSPVILSVSPGERVSFSCRASQSIGTNIHWYQQRTNGSPRLLIKYASESISGIPSRFSGSGSGTDFTLSINSVESEDIADYYCQQNNNWPTTFGAGTKLELK

SEQ ID NO: 584 - protein, 107 aa, Artificial Sequence
  Variable LC T005C
DILLCQSPVILSVSPGERVSFSCRASQSIGTNIHWYQQRTNGSPRLLIKYASESISGIPSRFSGSGSGTDFTLSINSVESEDIADYYCQQNNNWPTTFGAGTKLELK

SEQ ID NO: 585 - protein, 107 aa, Artificial Sequence
  Variable LC T005D
DILLDQSPVILSVSPGERVSFSCRASQSIGTNIHWYQQRTNGSPRLLIKYASESISGIPSRFSGSGSGTDFTLSINSVESEDIADYYCQQNNNWPTTFGAGTKLELK

SEQ ID NO: 586 - protein, 107 aa, Artificial Sequence
  Variable LC	T005E
DILLEQSPVILSVSPGERVSFSCRASQSIGTNIHWYQQRTNGSPRLLIKYASESISGIPSRFSGSGSGTDFTLSINSVESEDIADYYCQQNNNWPTTFGAGTKLELK

SEQ ID NO: 587 - protein, 107 aa, Artificial Sequence
  Variable LC T005F
DILLFQSPVILSVSPGERVSFSCRASQSIGTNIHWYQQRTNGSPRLLIKYASESISGIPSRFSGSGSGTDFTLSINSVESEDIADYYCQQNNNWPTTFGAGTKLELK

SEQ ID NO: 588 - protein, 107 aa, Artificial Sequence
  Variable LC	T005G
DILLGQSPVILSVSPGERVSFSCRASQSIGTNIHWYQQRTNGSPRLLIKYASESISGIPSRFSGSGSGTDFTLSINSVESEDIADYYCQQNNNWPTTFGAGTKLELK

SEQ ID NO: 589 - protein, 107 aa, Artificial Sequence
  Variable LC	T005N
DILLNQSPVILSVSPGERVSFSCRASQSIGTNIHWYQQRTNGSPRLLIKYASESISGIPSRFSGSGSGTDFTLSINSVESEDIADYYCQQNNNWPTTFGAGTKLELK

SEQ ID NO: 590 - protein, 107 aa, Artificial Sequence
  Variable LC T005S
DILLSQSPVILSVSPGERVSFSCRASQSIGTNIHWYQQRTNGSPRLLIKYASESISGIPSRFSGSGSGTDFTLSINSVESEDIADYYCQQNNNWPTTFGAGTKLELK

SEQ ID NO: 591 - protein, 107 aa, Artificial Sequence
  Variable LC T005W
DILLWQSPVILSVSPGERVSFSCRASQSIGTNIHWYQQRTNGSPRLLIKYASESISGIPSRFSGSGSGTDFTLSINSVESEDIADYYCQQNNNWPTTFGAGTKLELK

SEQ ID NO: 592 - protein, 107 aa, Artificial Sequence
  Variable LC T005L
DILLLQSPVILSVSPGERVSFSCRASQSIGTNIHWYQQRTNGSPRLLIKYASESISGIPSRFSGSGSGTDFTLSINSVESEDIADYYCQQNNNWPTTFGAGTKLELK

SEQ ID NO: 593 - protein, 107 aa, Artificial Sequence
  Variable LC T005K
DILLKQSPVILSVSPGERVSFSCRASQSIGTNIHWYQQRTNGSPRLLIKYASESISGIPSRFSGSGSGTDFTLSINSVESEDIADYYCQQNNNWPTTFGAGTKLELK

SEQ ID NO: 594 - protein, 107 aa, Artificial Sequence
  Variable LC T005H
DILLHQSPVILSVSPGERVSFSCRASQSIGTNIHWYQQRTNGSPRLLIKYASESISGIPSRFSGSGSGTDFTLSINSVESEDIADYYCQQNNNWPTTFGAGTKLELK

SEQ ID NO: 595 - protein, 107 aa, Artificial Sequence
  Variable LC	T005R
DILLRQSPVILSVSPGERVSFSCRASQSIGTNIHWYQQRTNGSPRLLIKYASESISGIPSRFSGSGSGTDFTLSINSVESEDIADYYCQQNNNWPTTFGAGTKLELK

SEQ ID NO: 596 - protein, 107 aa, Artificial Sequence
  Variable LC R024A
DILLTQSPVILSVSPGERVSFSCAASQSIGTNIHWYQQRTNGSPRLLIKYASESISGIPSRFSGSGSGTDFTLSINSVESEDIADYYCQQNNNWPTTFGAGTKLELK

SEQ ID NO: 597 - protein, 107 aa, Artificial Sequence
  Variable LC R024C
DILLTQSPVILSVSPGERVSFSCCASQSIGTNIHWYQQRTNGSPRLLIKYASESISGIPSRFSGSGSGTDFTLSINSVESEDIADYYCQQNNNWPTTFGAGTKLELK

SEQ ID NO: 598 - protein, 107 aa, Artificial Sequence
  Variable LC R024F
DILLTQSPVILSVSPGERVSFSCFASQSIGTNIHWYQQRTNGSPRLLIKYASESISGIPSRFSGSGSGTDFTLSINSVESEDIADYYCQQNNNWPTTFGAGTKLELK

SEQ ID NO: 599 - protein, 107 aa, Artificial Sequence
  Variable LC	R024L
DILLTQSPVILSVSPGERVSFSCLASQSIGTNIHWYQQRTNGSPRLLIKYASESISGIPSRFSGSGSGTDFTLSINSVESEDIADYYCQQNNNWPTTFGAGTKLELK

SEQ ID NO: 600 - protein, 107 aa, Artificial Sequence
  Variable LC	R024M
DILLTQSPVILSVSPGERVSFSCMASQSIGTNIHWYQQRTNGSPRLLIKYASESISGIPSRFSGSGSGTDFTLSINSVESEDIADYYCQQNNNWPTTFGAGTKLELK

SEQ ID NO: 601 - protein, 107 aa, Artificial Sequence
  Variable LC R024S
DILLTQSPVILSVSPGERVSFSCSASQSIGTNIHWYQQRTNGSPRLLIKYASESISGIPSRFSGSGSGTDFTLSINSVESEDIADYYCQQNNNWPTTFGAGTKLELK

SEQ ID NO: 602 - protein, 107 aa, Artificial Sequence
  Variable LC R024W
DILLTQSPVILSVSPGERVSFSCWASQSIGTNIHWYQQRTNGSPRLLIKYASESISGIPSRFSGSGSGTDFTLSINSVESEDIADYYCQQNNNWPTTFGAGTKLELK

SEQ ID NO: 603 - protein, 107 aa, Artificial Sequence
  Variable LC R024Y
DILLTQSPVILSVSPGERVSFSCYASQSIGTNIHWYQQRTNGSPRLLIKYASESISGIPSRFSGSGSGTDFTLSINSVESEDIADYYCQQNNNWPTTFGAGTKLELK

SEQ ID NO: 604 - protein, 107 aa, Artificial Sequence
  Variable LC A025C
DILLTQSPVILSVSPGERVSFSCRCSQSIGTNIHWYQQRTNGSPRLLIKYASESISGIPSRFSGSGSGTDFTLSINSVESEDIADYYCQQNNNWPTTFGAGTKLELK

SEQ ID NO: 605 - protein, 107 aa, Artificial Sequence
  Variable LC A025G
DILLTQSPVILSVSPGERVSFSCRGSQSIGTNIHWYQQRTNGSPRLLIKYASESISGIPSRFSGSGSGTDFTLSINSVESEDIADYYCQQNNNWPTTFGAGTKLELK

SEQ ID NO: 606 - protein, 107 aa, Artificial Sequence
  Variable LC A025L
DILLTQSPVILSVSPGERVSFSCRLSQSIGTNIHWYQQRTNGSPRLLIKYASESISGIPSRFSGSGSGTDFTLSINSVESEDIADYYCQQNNNWPTTFGAGTKLELK

SEQ ID NO: 607 - protein, 107 aa, Artificial Sequence
  Variable LC A025V
DILLTQSPVILSVSPGERVSFSCRVSQSIGTNIHWYQQRTNGSPRLLIKYASESISGIPSRFSGSGSGTDFTLSINSVESEDIADYYCQQNNNWPTTFGAGTKLELK

SEQ ID NO: 608 - protein, 107 aa, Artificial Sequence
  Variable LC	S026A
DILLTQSPVILSVSPGERVSFSCRAAQSIGTNIHWYQQRTNGSPRLLIKYASESISGIPSRFSGSGSGTDFTLSINSVESEDIADYYCQQNNNWPTTFGAGTKLELK

SEQ ID NO: 609 - protein, 107 aa, Artificial Sequence
  Variable LC S026C
DILLTQSPVILSVSPGERVSFSCRACQSIGTNIHWYQQRTNGSPRLLIKYASESISGIPSRFSGSGSGTDFTLSINSVESEDIADYYCQQNNNWPTTFGAGTKLELK

SEQ ID NO: 610 - protein, 107 aa, Artificial Sequence
  Variable LC S026D
DILLTQSPVILSVSPGERVSFSCRADQSIGTNIHWYQQRTNGSPRLLIKYASESISGIPSRFSGSGSGTDFTLSINSVESEDIADYYCQQNNNWPTTFGAGTKLELK

SEQ ID NO: 611 - protein, 107 aa, Artificial Sequence
  Variable LC	S026I
DILLTQSPVILSVSPGERVSFSCRAIQSIGTNIHWYQQRTNGSPRLLIKYASESISGIPSRFSGSGSGTDFTLSINSVESEDIADYYCQQNNNWPTTFGAGTKLELK

SEQ ID NO: 612 - protein, 107 aa, Artificial Sequence
  Variable LC	S026M
DILLTQSPVILSVSPGERVSFSCRAMQSIGTNIHWYQQRTNGSPRLLIKYASESISGIPSRFSGSGSGTDFTLSINSVESEDIADYYCQQNNNWPTTFGAGTKLELK

SEQ ID NO: 613 - protein, 107 aa, Artificial Sequence
  Variable LC	S026N
DILLTQSPVILSVSPGERVSFSCRANQSIGTNIHWYQQRTNGSPRLLIKYASESISGIPSRFSGSGSGTDFTLSINSVESEDIADYYCQQNNNWPTTFGAGTKLELK

SEQ ID NO: 614 - protein, 107 aa, Artificial Sequence
  Variable LC	S026V
DILLTQSPVILSVSPGERVSFSCRAVQSIGTNIHWYQQRTNGSPRLLIKYASESISGIPSRFSGSGSGTDFTLSINSVESEDIADYYCQQNNNWPTTFGAGTKLELK

SEQ ID NO: 615 - protein, 107 aa, Artificial Sequence
  Variable LC S026W
DILLTQSPVILSVSPGERVSFSCRAWQSIGTNIHWYQQRTNGSPRLLIKYASESISGIPSRFSGSGSGTDFTLSINSVESEDIADYYCQQNNNWPTTFGAGTKLELK

SEQ ID NO: 616 - protein, 107 aa, Artificial Sequence
  Variable LC	S026L
DILLTQSPVILSVSPGERVSFSCRALQSIGTNIHWYQQRTNGSPRLLIKYASESISGIPSRFSGSGSGTDFTLSINSVESEDIADYYCQQNNNWPTTFGAGTKLELK

SEQ ID NO: 617 - protein, 107 aa, Artificial Sequence
  Variable LC S026G
DILLTQSPVILSVSPGERVSFSCRAGQSIGTNIHWYQQRTNGSPRLLIKYASESISGIPSRFSGSGSGTDFTLSINSVESEDIADYYCQQNNNWPTTFGAGTKLELK

SEQ ID NO: 618 - protein, 107 aa, Artificial Sequence
  Variable LC	S026H
DILLTQSPVILSVSPGERVSFSCRAHQSIGTNIHWYQQRTNGSPRLLIKYASESISGIPSRFSGSGSGTDFTLSINSVESEDIADYYCQQNNNWPTTFGAGTKLELK

SEQ ID NO: 619 - protein, 107 aa, Artificial Sequence
  Variable LC	S026R
DILLTQSPVILSVSPGERVSFSCRARQSIGTNIHWYQQRTNGSPRLLIKYASESISGIPSRFSGSGSGTDFTLSINSVESEDIADYYCQQNNNWPTTFGAGTKLELK

SEQ ID NO: 620 - protein, 107 aa, Artificial Sequence
  Variable LC Q027A
DILLTQSPVILSVSPGERVSFSCRASASIGTNIHWYQQRTNGSPRLLIKYASESISGIPSRFSGSGSGTDFTLSINSVESEDIADYYCQQNNNWPTTFGAGTKLELK

SEQ ID NO: 621 - protein, 107 aa, Artificial Sequence
  Variable LC Q027D
DILLTQSPVILSVSPGERVSFSCRASDSIGTNIHWYQQRTNGSPRLLIKYASESISGIPSRFSGSGSGTDFTLSINSVESEDIADYYCQQNNNWPTTFGAGTKLELK

SEQ ID NO: 622 - protein, 107 aa, Artificial Sequence
  Variable LC	Q027E
DILLTQSPVILSVSPGERVSFSCRASESIGTNIHWYQQRTNGSPRLLIKYASESISGIPSRFSGSGSGTDFTLSINSVESEDIADYYCQQNNNWPTTFGAGTKLELK

SEQ ID NO: 623 - protein, 107 aa, Artificial Sequence
  Variable LC	Q027F
DILLTQSPVILSVSPGERVSFSCRASFSIGTNIHWYQQRTNGSPRLLIKYASESISGIPSRFSGSGSGTDFTLSINSVESEDIADYYCQQNNNWPTTFGAGTKLELK

SEQ ID NO: 624 - protein, 107 aa, Artificial Sequence
  Variable LC	Q027I
DILLTQSPVILSVSPGERVSFSCRASISIGTNIHWYQQRTNGSPRLLIKYASESISGIPSRFSGSGSGTDFTLSINSVESEDIADYYCQQNNNWPTTFGAGTKLELK

SEQ ID NO: 625 - protein, 107 aa, Artificial Sequence
  Variable LC Q027M
DILLTQSPVILSVSPGERVSFSCRASMSIGTNIHWYQQRTNGSPRLLIKYASESISGIPSRFSGSGSGTDFTLSINSVESEDIADYYCQQNNNWPTTFGAGTKLELK

SEQ ID NO: 626 - protein, 107 aa, Artificial Sequence
  Variable LC Q027N
DILLTQSPVILSVSPGERVSFSCRASNSIGTNIHWYQQRTNGSPRLLIKYASESISGIPSRFSGSGSGTDFTLSINSVESEDIADYYCQQNNNWPTTFGAGTKLELK

SEQ ID NO: 627 - protein, 107 aa, Artificial Sequence
  Variable LC Q027P
DILLTQSPVILSVSPGERVSFSCRASPSIGTNIHWYQQRTNGSPRLLIKYASESISGIPSRFSGSGSGTDFTLSINSVESEDIADYYCQQNNNWPTTFGAGTKLELK

SEQ ID NO: 628 - protein, 107 aa, Artificial Sequence
  Variable LC Q027T
DILLTQSPVILSVSPGERVSFSCRASTSIGTNIHWYQQRTNGSPRLLIKYASESISGIPSRFSGSGSGTDFTLSINSVESEDIADYYCQQNNNWPTTFGAGTKLELK

SEQ ID NO: 629 - protein, 107 aa, Artificial Sequence
  Variable LC S028A
DILLTQSPVILSVSPGERVSFSCRASQAIGTNIHWYQQRTNGSPRLLIKYASESISGIPSRFSGSGSGTDFTLSINSVESEDIADYYCQQNNNWPTTFGAGTKLELK

SEQ ID NO: 630 - protein, 107 aa, Artificial Sequence
  Variable LC S028D
DILLTQSPVILSVSPGERVSFSCRASQDIGTNIHWYQQRTNGSPRLLIKYASESISGIPSRFSGSGSGTDFTLSINSVESEDIADYYCQQNNNWPTTFGAGTKLELK

SEQ ID NO: 631 - protein, 107 aa, Artificial Sequence
  Variable LC S028N
DILLTQSPVILSVSPGERVSFSCRASQNIGTNIHWYQQRTNGSPRLLIKYASESISGIPSRFSGSGSGTDFTLSINSVESEDIADYYCQQNNNWPTTFGAGTKLELK

SEQ ID NO: 632 - protein, 107 aa, Artificial Sequence
  Variable LC S028Q
DILLTQSPVILSVSPGERVSFSCRASQQIGTNIHWYQQRTNGSPRLLIKYASESISGIPSRFSGSGSGTDFTLSINSVESEDIADYYCQQNNNWPTTFGAGTKLELK

SEQ ID NO: 633 - protein, 107 aa, Artificial Sequence
  Variable LC S028L
DILLTQSPVILSVSPGERVSFSCRASQLIGTNIHWYQQRTNGSPRLLIKYASESISGIPSRFSGSGSGTDFTLSINSVESEDIADYYCQQNNNWPTTFGAGTKLELK

SEQ ID NO: 634 - protein, 107 aa, Artificial Sequence
  Variable LC S028K
DILLTQSPVILSVSPGERVSFSCRASQKIGTNIHWYQQRTNGSPRLLIKYASESISGIPSRFSGSGSGTDFTLSINSVESEDIADYYCQQNNNWPTTFGAGTKLELK

SEQ ID NO: 635 - protein, 107 aa, Artificial Sequence
  Variable LC S028H
DILLTQSPVILSVSPGERVSFSCRASQHIGTNIHWYQQRTNGSPRLLIKYASESISGIPSRFSGSGSGTDFTLSINSVESEDIADYYCQQNNNWPTTFGAGTKLELK

SEQ ID NO: 636 - protein, 107 aa, Artificial Sequence
  Variable LC I029A
DILLTQSPVILSVSPGERVSFSCRASQSAGTNIHWYQQRTNGSPRLLIKYASESISGIPSRFSGSGSGTDFTLSINSVESEDIADYYCQQNNNWPTTFGAGTKLELK

SEQ ID NO: 637 - protein, 107 aa, Artificial Sequence
  Variable LC I029E
DILLTQSPVILSVSPGERVSFSCRASQSEGTNIHWYQQRTNGSPRLLIKYASESISGIPSRFSGSGSGTDFTLSINSVESEDIADYYCQQNNNWPTTFGAGTKLELK

SEQ ID NO: 638 - protein, 107 aa, Artificial Sequence
  Variable LC I029F
DILLTQSPVILSVSPGERVSFSCRASQSFGTNIHWYQQRTNGSPRLLIKYASESISGIPSRFSGSGSGTDFTLSINSVESEDIADYYCQQNNNWPTTFGAGTKLELK

SEQ ID NO: 639 - protein, 107 aa, Artificial Sequence
  Variable LC I029S
DILLTQSPVILSVSPGERVSFSCRASQSSGTNIHWYQQRTNGSPRLLIKYASESISGIPSRFSGSGSGTDFTLSINSVESEDIADYYCQQNNNWPTTFGAGTKLELK

SEQ ID NO: 640 - protein, 107 aa, Artificial Sequence
  Variable LC I029T
DILLTQSPVILSVSPGERVSFSCRASQSTGTNIHWYQQRTNGSPRLLIKYASESISGIPSRFSGSGSGTDFTLSINSVESEDIADYYCQQNNNWPTTFGAGTKLELK

SEQ ID NO: 641 - protein, 107 aa, Artificial Sequence
  Variable LC I029R
DILLTQSPVILSVSPGERVSFSCRASQSRGTNIHWYQQRTNGSPRLLIKYASESISGIPSRFSGSGSGTDFTLSINSVESEDIADYYCQQNNNWPTTFGAGTKLELK

SEQ ID NO: 642 - protein, 107 aa, Artificial Sequence
  Variable LC G030A
DILLTQSPVILSVSPGERVSFSCRASQSIATNIHWYQQRTNGSPRLLIKYASESISGIPSRFSGSGSGTDFTLSINSVESEDIADYYCQQNNNWPTTFGAGTKLELK

SEQ ID NO: 643 - protein, 107 aa, Artificial Sequence
  Variable LC G030E
DILLTQSPVILSVSPGERVSFSCRASQSIETNIHWYQQRTNGSPRLLIKYASESISGIPSRFSGSGSGTDFTLSINSVESEDIADYYCQQNNNWPTTFGAGTKLELK

SEQ ID NO: 644 - protein, 107 aa, Artificial Sequence
  Variable LC G030F
DILLTQSPVILSVSPGERVSFSCRASQSIFTNIHWYQQRTNGSPRLLIKYASESISGIPSRFSGSGSGTDFTLSINSVESEDIADYYCQQNNNWPTTFGAGTKLELK

SEQ ID NO: 645 - protein, 107 aa, Artificial Sequence
  Variable LC G030I
DILLTQSPVILSVSPGERVSFSCRASQSIITNIHWYQQRTNGSPRLLIKYASESISGIPSRFSGSGSGTDFTLSINSVESEDIADYYCQQNNNWPTTFGAGTKLELK

SEQ ID NO: 646 - protein, 107 aa, Artificial Sequence
  Variable LC	G030M
DILLTQSPVILSVSPGERVSFSCRASQSIMTNIHWYQQRTNGSPRLLIKYASESISGIPSRFSGSGSGTDFTLSINSVESEDIADYYCQQNNNWPTTFGAGTKLELK

SEQ ID NO: 647 - protein, 107 aa, Artificial Sequence
  Variable LC	G030P
DILLTQSPVILSVSPGERVSFSCRASQSIPTNIHWYQQRTNGSPRLLIKYASESISGIPSRFSGSGSGTDFTLSINSVESEDIADYYCQQNNNWPTTFGAGTKLELK

SEQ ID NO: 648 - protein, 107 aa, Artificial Sequence
  Variable LC G030Q
DILLTQSPVILSVSPGERVSFSCRASQSIQTNIHWYQQRTNGSPRLLIKYASESISGIPSRFSGSGSGTDFTLSINSVESEDIADYYCQQNNNWPTTFGAGTKLELK

SEQ ID NO: 649 - protein, 107 aa, Artificial Sequence
  Variable LC G030S
DILLTQSPVILSVSPGERVSFSCRASQSISTNIHWYQQRTNGSPRLLIKYASESISGIPSRFSGSGSGTDFTLSINSVESEDIADYYCQQNNNWPTTFGAGTKLELK

SEQ ID NO: 650 - protein, 107 aa, Artificial Sequence
  Variable LC	G030V
DILLTQSPVILSVSPGERVSFSCRASQSIVTNIHWYQQRTNGSPRLLIKYASESISGIPSRFSGSGSGTDFTLSINSVESEDIADYYCQQNNNWPTTFGAGTKLELK

SEQ ID NO: 651 - protein, 107 aa, Artificial Sequence
  Variable LC G030Y
DILLTQSPVILSVSPGERVSFSCRASQSIYTNIHWYQQRTNGSPRLLIKYASESISGIPSRFSGSGSGTDFTLSINSVESEDIADYYCQQNNNWPTTFGAGTKLELK

SEQ ID NO: 652 - protein, 107 aa, Artificial Sequence
  Variable LC G030L
DILLTQSPVILSVSPGERVSFSCRASQSILTNIHWYQQRTNGSPRLLIKYASESISGIPSRFSGSGSGTDFTLSINSVESEDIADYYCQQNNNWPTTFGAGTKLELK

SEQ ID NO: 653 - protein, 107 aa, Artificial Sequence
  Variable LC G030K
DILLTQSPVILSVSPGERVSFSCRASQSIKTNIHWYQQRTNGSPRLLIKYASESISGIPSRFSGSGSGTDFTLSINSVESEDIADYYCQQNNNWPTTFGAGTKLELK

SEQ ID NO: 654 - protein, 107 aa, Artificial Sequence
  Variable LC G030H
DILLTQSPVILSVSPGERVSFSCRASQSIHTNIHWYQQRTNGSPRLLIKYASESISGIPSRFSGSGSGTDFTLSINSVESEDIADYYCQQNNNWPTTFGAGTKLELK

SEQ ID NO: 655 - protein, 107 aa, Artificial Sequence
  Variable LC G030R
DILLTQSPVILSVSPGERVSFSCRASQSIRTNIHWYQQRTNGSPRLLIKYASESISGIPSRFSGSGSGTDFTLSINSVESEDIADYYCQQNNNWPTTFGAGTKLELK

SEQ ID NO: 656 - protein, 107 aa, Artificial Sequence
  Variable LC T031A
DILLTQSPVILSVSPGERVSFSCRASQSIGANIHWYQQRTNGSPRLLIKYASESISGIPSRFSGSGSGTDFTLSINSVESEDIADYYCQQNNNWPTTFGAGTKLELK

SEQ ID NO: 657 - protein, 107 aa, Artificial Sequence
  Variable LC T031F
DILLTQSPVILSVSPGERVSFSCRASQSIGFNIHWYQQRTNGSPRLLIKYASESISGIPSRFSGSGSGTDFTLSINSVESEDIADYYCQQNNNWPTTFGAGTKLELK

SEQ ID NO: 658 - protein, 107 aa, Artificial Sequence
  Variable LC	T031G
DILLTQSPVILSVSPGERVSFSCRASQSIGGNIHWYQQRTNGSPRLLIKYASESISGIPSRFSGSGSGTDFTLSINSVESEDIADYYCQQNNNWPTTFGAGTKLELK

SEQ ID NO: 659 - protein, 107 aa, Artificial Sequence
  Variable LC T031M
DILLTQSPVILSVSPGERVSFSCRASQSIGMNIHWYQQRTNGSPRLLIKYASESISGIPSRFSGSGSGTDFTLSINSVESEDIADYYCQQNNNWPTTFGAGTKLELK

SEQ ID NO: 660 - protein, 107 aa, Artificial Sequence
  Variable LC T031S
DILLTQSPVILSVSPGERVSFSCRASQSIGSNIHWYQQRTNGSPRLLIKYASESISGIPSRFSGSGSGTDFTLSINSVESEDIADYYCQQNNNWPTTFGAGTKLELK

SEQ ID NO: 661 - protein, 107 aa, Artificial Sequence
  Variable LC	T031V
DILLTQSPVILSVSPGERVSFSCRASQSIGVNIHWYQQRTNGSPRLLIKYASESISGIPSRFSGSGSGTDFTLSINSVESEDIADYYCQQNNNWPTTFGAGTKLELK

SEQ ID NO: 662 - protein, 107 aa, Artificial Sequence
  Variable LC T031W
DILLTQSPVILSVSPGERVSFSCRASQSIGWNIHWYQQRTNGSPRLLIKYASESISGIPSRFSGSGSGTDFTLSINSVESEDIADYYCQQNNNWPTTFGAGTKLELK

SEQ ID NO: 663 - protein, 107 aa, Artificial Sequence
  Variable LC	T031L
DILLTQSPVILSVSPGERVSFSCRASQSIGLNIHWYQQRTNGSPRLLIKYASESISGIPSRFSGSGSGTDFTLSINSVESEDIADYYCQQNNNWPTTFGAGTKLELK

SEQ ID NO: 664 - protein, 107 aa, Artificial Sequence
  Variable LC T031K
DILLTQSPVILSVSPGERVSFSCRASQSIGKNIHWYQQRTNGSPRLLIKYASESISGIPSRFSGSGSGTDFTLSINSVESEDIADYYCQQNNNWPTTFGAGTKLELK

SEQ ID NO: 665 - protein, 107 aa, Artificial Sequence
  Variable LC	T031H
DILLTQSPVILSVSPGERVSFSCRASQSIGHNIHWYQQRTNGSPRLLIKYASESISGIPSRFSGSGSGTDFTLSINSVESEDIADYYCQQNNNWPTTFGAGTKLELK

SEQ ID NO: 666 - protein, 107 aa, Artificial Sequence
  Variable LC N032G
DILLTQSPVILSVSPGERVSFSCRASQSIGTGIHWYQQRTNGSPRLLIKYASESISGIPSRFSGSGSGTDFTLSINSVESEDIADYYCQQNNNWPTTFGAGTKLELK

SEQ ID NO: 667 - protein, 107 aa, Artificial Sequence
  Variable LC	I033F
DILLTQSPVILSVSPGERVSFSCRASQSIGTNFHWYQQRTNGSPRLLIKYASESISGIPSRFSGSGSGTDFTLSINSVESEDIADYYCQQNNNWPTTFGAGTKLELK

SEQ ID NO: 668 - protein, 107 aa, Artificial Sequence
  Variable LC I033G
DILLTQSPVILSVSPGERVSFSCRASQSIGTNGHWYQQRTNGSPRLLIKYASESISGIPSRFSGSGSGTDFTLSINSVESEDIADYYCQQNNNWPTTFGAGTKLELK

SEQ ID NO: 669 - protein, 107 aa, Artificial Sequence
  Variable LC	I033M
DILLTQSPVILSVSPGERVSFSCRASQSIGTNMHWYQQRTNGSPRLLIKYASESISGIPSRFSGSGSGTDFTLSINSVESEDIADYYCQQNNNWPTTFGAGTKLELK

SEQ ID NO: 670 - protein, 107 aa, Artificial Sequence
  Variable LC	I033T
DILLTQSPVILSVSPGERVSFSCRASQSIGTNTHWYQQRTNGSPRLLIKYASESISGIPSRFSGSGSGTDFTLSINSVESEDIADYYCQQNNNWPTTFGAGTKLELK

SEQ ID NO: 671 - protein, 107 aa, Artificial Sequence
  Variable LC I033V
DILLTQSPVILSVSPGERVSFSCRASQSIGTNVHWYQQRTNGSPRLLIKYASESISGIPSRFSGSGSGTDFTLSINSVESEDIADYYCQQNNNWPTTFGAGTKLELK

SEQ ID NO: 672 - protein, 107 aa, Artificial Sequence
  Variable LC I033H
DILLTQSPVILSVSPGERVSFSCRASQSIGTNHHWYQQRTNGSPRLLIKYASESISGIPSRFSGSGSGTDFTLSINSVESEDIADYYCQQNNNWPTTFGAGTKLELK

SEQ ID NO: 673 - protein, 107 aa, Artificial Sequence
  Variable LC I048M
DILLTQSPVILSVSPGERVSFSCRASQSIGTNIHWYQQRTNGSPRLLMKYASESISGIPSRFSGSGSGTDFTLSINSVESEDIADYYCQQNNNWPTTFGAGTKLELK

SEQ ID NO: 674 - protein, 107 aa, Artificial Sequence
  Variable LC I048S
DILLTQSPVILSVSPGERVSFSCRASQSIGTNIHWYQQRTNGSPRLLSKYASESISGIPSRFSGSGSGTDFTLSINSVESEDIADYYCQQNNNWPTTFGAGTKLELK

SEQ ID NO: 675 - protein, 107 aa, Artificial Sequence
  Variable LC I048L
DILLTQSPVILSVSPGERVSFSCRASQSIGTNIHWYQQRTNGSPRLLLKYASESISGIPSRFSGSGSGTDFTLSINSVESEDIADYYCQQNNNWPTTFGAGTKLELK

SEQ ID NO: 676 - protein, 107 aa, Artificial Sequence
  Variable LC I048K
DILLTQSPVILSVSPGERVSFSCRASQSIGTNIHWYQQRTNGSPRLLKKYASESISGIPSRFSGSGSGTDFTLSINSVESEDIADYYCQQNNNWPTTFGAGTKLELK

SEQ ID NO: 677 - protein, 107 aa, Artificial Sequence
  Variable LC K049A
DILLTQSPVILSVSPGERVSFSCRASQSIGTNIHWYQQRTNGSPRLLIAYASESISGIPSRFSGSGSGTDFTLSINSVESEDIADYYCQQNNNWPTTFGAGTKLELK

SEQ ID NO: 678 - protein, 107 aa, Artificial Sequence
  Variable LC K049E
DILLTQSPVILSVSPGERVSFSCRASQSIGTNIHWYQQRTNGSPRLLIEYASESISGIPSRFSGSGSGTDFTLSINSVESEDIADYYCQQNNNWPTTFGAGTKLELK

SEQ ID NO: 679 - protein, 107 aa, Artificial Sequence
  Variable LC K049F
DILLTQSPVILSVSPGERVSFSCRASQSIGTNIHWYQQRTNGSPRLLIFYASESISGIPSRFSGSGSGTDFTLSINSVESEDIADYYCQQNNNWPTTFGAGTKLELK

SEQ ID NO: 680 - protein, 107 aa, Artificial Sequence
  Variable LC	K049G
DILLTQSPVILSVSPGERVSFSCRASQSIGTNIHWYQQRTNGSPRLLIGYASESISGIPSRFSGSGSGTDFTLSINSVESEDIADYYCQQNNNWPTTFGAGTKLELK

SEQ ID NO: 681 - protein, 107 aa, Artificial Sequence
  Variable LC K049N
DILLTQSPVILSVSPGERVSFSCRASQSIGTNIHWYQQRTNGSPRLLINYASESISGIPSRFSGSGSGTDFTLSINSVESEDIADYYCQQNNNWPTTFGAGTKLELK

SEQ ID NO: 682 - protein, 107 aa, Artificial Sequence
  Variable LC K049Q
DILLTQSPVILSVSPGERVSFSCRASQSIGTNIHWYQQRTNGSPRLLIQYASESISGIPSRFSGSGSGTDFTLSINSVESEDIADYYCQQNNNWPTTFGAGTKLELK

SEQ ID NO: 683 - protein, 107 aa, Artificial Sequence
  Variable LC K049S
DILLTQSPVILSVSPGERVSFSCRASQSIGTNIHWYQQRTNGSPRLLISYASESISGIPSRFSGSGSGTDFTLSINSVESEDIADYYCQQNNNWPTTFGAGTKLELK

SEQ ID NO: 684 - protein, 107 aa, Artificial Sequence
  Variable LC	K049T
DILLTQSPVILSVSPGERVSFSCRASQSIGTNIHWYQQRTNGSPRLLITYASESISGIPSRFSGSGSGTDFTLSINSVESEDIADYYCQQNNNWPTTFGAGTKLELK

SEQ ID NO: 685 - protein, 107 aa, Artificial Sequence
  Variable LC K049V
DILLTQSPVILSVSPGERVSFSCRASQSIGTNIHWYQQRTNGSPRLLIVYASESISGIPSRFSGSGSGTDFTLSINSVESEDIADYYCQQNNNWPTTFGAGTKLELK

SEQ ID NO: 686 - protein, 107 aa, Artificial Sequence
  Variable LC K049Y
DILLTQSPVILSVSPGERVSFSCRASQSIGTNIHWYQQRTNGSPRLLIYYASESISGIPSRFSGSGSGTDFTLSINSVESEDIADYYCQQNNNWPTTFGAGTKLELK

SEQ ID NO: 687 - protein, 107 aa, Artificial Sequence
  Variable LC K049L
DILLTQSPVILSVSPGERVSFSCRASQSIGTNIHWYQQRTNGSPRLLILYASESISGIPSRFSGSGSGTDFTLSINSVESEDIADYYCQQNNNWPTTFGAGTKLELK

SEQ ID NO: 688 - protein, 107 aa, Artificial Sequence
  Variable LC K049H
DILLTQSPVILSVSPGERVSFSCRASQSIGTNIHWYQQRTNGSPRLLIHYASESISGIPSRFSGSGSGTDFTLSINSVESEDIADYYCQQNNNWPTTFGAGTKLELK

SEQ ID NO: 689 - protein, 107 aa, Artificial Sequence
  Variable LC K049R
DILLTQSPVILSVSPGERVSFSCRASQSIGTNIHWYQQRTNGSPRLLIRYASESISGIPSRFSGSGSGTDFTLSINSVESEDIADYYCQQNNNWPTTFGAGTKLELK

SEQ ID NO: 690 - protein, 107 aa, Artificial Sequence
  Variable LC A051T
DILLTQSPVILSVSPGERVSFSCRASQSIGTNIHWYQQRTNGSPRLLIKYTSESISGIPSRFSGSGSGTDFTLSINSVESEDIADYYCQQNNNWPTTFGAGTKLELK

SEQ ID NO: 691 - protein, 107 aa, Artificial Sequence
  Variable LC A051L
DILLTQSPVILSVSPGERVSFSCRASQSIGTNIHWYQQRTNGSPRLLIKYLSESISGIPSRFSGSGSGTDFTLSINSVESEDIADYYCQQNNNWPTTFGAGTKLELK

SEQ ID NO: 692 - protein, 107 aa, Artificial Sequence
  Variable LC S052A
DILLTQSPVILSVSPGERVSFSCRASQSIGTNIHWYQQRTNGSPRLLIKYAAESISGIPSRFSGSGSGTDFTLSINSVESEDIADYYCQQNNNWPTTFGAGTKLELK

SEQ ID NO: 693 - protein, 107 aa, Artificial Sequence
  Variable LC S052C
DILLTQSPVILSVSPGERVSFSCRASQSIGTNIHWYQQRTNGSPRLLIKYACESISGIPSRFSGSGSGTDFTLSINSVESEDIADYYCQQNNNWPTTFGAGTKLELK

SEQ ID NO: 694 - protein, 107 aa, Artificial Sequence
  Variable LC S052D
DILLTQSPVILSVSPGERVSFSCRASQSIGTNIHWYQQRTNGSPRLLIKYADESISGIPSRFSGSGSGTDFTLSINSVESEDIADYYCQQNNNWPTTFGAGTKLELK

SEQ ID NO: 695 - protein, 107 aa, Artificial Sequence
  Variable LC S052E
DILLTQSPVILSVSPGERVSFSCRASQSIGTNIHWYQQRTNGSPRLLIKYAEESISGIPSRFSGSGSGTDFTLSINSVESEDIADYYCQQNNNWPTTFGAGTKLELK

SEQ ID NO: 696 - protein, 107 aa, Artificial Sequence
  Variable LC S052G
DILLTQSPVILSVSPGERVSFSCRASQSIGTNIHWYQQRTNGSPRLLIKYAGESISGIPSRFSGSGSGTDFTLSINSVESEDIADYYCQQNNNWPTTFGAGTKLELK

SEQ ID NO: 697 - protein, 107 aa, Artificial Sequence
  Variable LC S052I
DILLTQSPVILSVSPGERVSFSCRASQSIGTNIHWYQQRTNGSPRLLIKYAIESISGIPSRFSGSGSGTDFTLSINSVESEDIADYYCQQNNNWPTTFGAGTKLELK

SEQ ID NO: 698 - protein, 107 aa, Artificial Sequence
  Variable LC S052M
DILLTQSPVILSVSPGERVSFSCRASQSIGTNIHWYQQRTNGSPRLLIKYAMESISGIPSRFSGSGSGTDFTLSINSVESEDIADYYCQQNNNWPTTFGAGTKLELK

SEQ ID NO: 699 - protein, 107 aa, Artificial Sequence
  Variable LC S052Q
DILLTQSPVILSVSPGERVSFSCRASQSIGTNIHWYQQRTNGSPRLLIKYAQESISGIPSRFSGSGSGTDFTLSINSVESEDIADYYCQQNNNWPTTFGAGTKLELK

SEQ ID NO: 700 - protein, 107 aa, Artificial Sequence
  Variable LC S052V
DILLTQSPVILSVSPGERVSFSCRASQSIGTNIHWYQQRTNGSPRLLIKYAVESISGIPSRFSGSGSGTDFTLSINSVESEDIADYYCQQNNNWPTTFGAGTKLELK

SEQ ID NO: 701 - protein, 107 aa, Artificial Sequence
  Variable LC S052W
DILLTQSPVILSVSPGERVSFSCRASQSIGTNIHWYQQRTNGSPRLLIKYAWESISGIPSRFSGSGSGTDFTLSINSVESEDIADYYCQQNNNWPTTFGAGTKLELK

SEQ ID NO: 702 - protein, 107 aa, Artificial Sequence
  Variable LC S052R
DILLTQSPVILSVSPGERVSFSCRASQSIGTNIHWYQQRTNGSPRLLIKYARESISGIPSRFSGSGSGTDFTLSINSVESEDIADYYCQQNNNWPTTFGAGTKLELK

SEQ ID NO: 703 - protein, 107 aa, Artificial Sequence
  Variable LC S052K
DILLTQSPVILSVSPGERVSFSCRASQSIGTNIHWYQQRTNGSPRLLIKYAKESISGIPSRFSGSGSGTDFTLSINSVESEDIADYYCQQNNNWPTTFGAGTKLELK

SEQ ID NO: 704 - protein, 107 aa, Artificial Sequence
  Variable LC E053G
DILLTQSPVILSVSPGERVSFSCRASQSIGTNIHWYQQRTNGSPRLLIKYASGSISGIPSRFSGSGSGTDFTLSINSVESEDIADYYCQQNNNWPTTFGAGTKLELK

SEQ ID NO: 705 - protein, 107 aa, Artificial Sequence
  Variable LC S054M
DILLTQSPVILSVSPGERVSFSCRASQSIGTNIHWYQQRTNGSPRLLIKYASEMISGIPSRFSGSGSGTDFTLSINSVESEDIADYYCQQNNNWPTTFGAGTKLELK

SEQ ID NO: 706 - protein, 107 aa, Artificial Sequence
  Variable LC I055A
DILLTQSPVILSVSPGERVSFSCRASQSIGTNIHWYQQRTNGSPRLLIKYASESASGIPSRFSGSGSGTDFTLSINSVESEDIADYYCQQNNNWPTTFGAGTKLELK

SEQ ID NO: 707 - protein, 107 aa, Artificial Sequence
  Variable LC I055F
DILLTQSPVILSVSPGERVSFSCRASQSIGTNIHWYQQRTNGSPRLLIKYASESFSGIPSRFSGSGSGTDFTLSINSVESEDIADYYCQQNNNWPTTFGAGTKLELK

SEQ ID NO: 708 - protein, 107 aa, Artificial Sequence
  Variable LC S056G
DILLTQSPVILSVSPGERVSFSCRASQSIGTNIHWYQQRTNGSPRLLIKYASESIGGIPSRFSGSGSGTDFTLSINSVESEDIADYYCQQNNNWPTTFGAGTKLELK

SEQ ID NO: 709 - protein, 107 aa, Artificial Sequence
  Variable LC S056L
DILLTQSPVILSVSPGERVSFSCRASQSIGTNIHWYQQRTNGSPRLLIKYASESILGIPSRFSGSGSGTDFTLSINSVESEDIADYYCQQNNNWPTTFGAGTKLELK

SEQ ID NO: 710 - protein, 107 aa, Artificial Sequence
  Variable LC S056A
DILLTQSPVILSVSPGERVSFSCRASQSIGTNIHWYQQRTNGSPRLLIKYASESIAGIPSRFSGSGSGTDFTLSINSVESEDIADYYCQQNNNWPTTFGAGTKLELK

SEQ ID NO: 711 - protein, 107 aa, Artificial Sequence
  Variable LC S056C
DILLTQSPVILSVSPGERVSFSCRASQSIGTNIHWYQQRTNGSPRLLIKYASESICGIPSRFSGSGSGTDFTLSINSVESEDIADYYCQQNNNWPTTFGAGTKLELK

SEQ ID NO: 712 - protein, 107 aa, Artificial Sequence
  Variable LC S056D
DILLTQSPVILSVSPGERVSFSCRASQSIGTNIHWYQQRTNGSPRLLIKYASESIDGIPSRFSGSGSGTDFTLSINSVESEDIADYYCQQNNNWPTTFGAGTKLELK

SEQ ID NO: 713 - protein, 107 aa, Artificial Sequence
  Variable LC S056E
DILLTQSPVILSVSPGERVSFSCRASQSIGTNIHWYQQRTNGSPRLLIKYASESIEGIPSRFSGSGSGTDFTLSINSVESEDIADYYCQQNNNWPTTFGAGTKLELK

SEQ ID NO: 714 - protein, 107 aa, Artificial Sequence
  Variable LC	S056F
DILLTQSPVILSVSPGERVSFSCRASQSIGTNIHWYQQRTNGSPRLLIKYASESIFGIPSRFSGSGSGTDFTLSINSVESEDIADYYCQQNNNWPTTFGAGTKLELK

SEQ ID NO: 715 - protein, 107 aa, Artificial Sequence
  Variable LC S056N
DILLTQSPVILSVSPGERVSFSCRASQSIGTNIHWYQQRTNGSPRLLIKYASESINGIPSRFSGSGSGTDFTLSINSVESEDIADYYCQQNNNWPTTFGAGTKLELK

SEQ ID NO: 716 - protein, 107 aa, Artificial Sequence
  Variable LC S056P
DILLTQSPVILSVSPGERVSFSCRASQSIGTNIHWYQQRTNGSPRLLIKYASESIPGIPSRFSGSGSGTDFTLSINSVESEDIADYYCQQNNNWPTTFGAGTKLELK

SEQ ID NO: 717 - protein, 107 aa, Artificial Sequence
  Variable LC S056Q
DILLTQSPVILSVSPGERVSFSCRASQSIGTNIHWYQQRTNGSPRLLIKYASESIQGIPSRFSGSGSGTDFTLSINSVESEDIADYYCQQNNNWPTTFGAGTKLELK

SEQ ID NO: 718 - protein, 107 aa, Artificial Sequence
  Variable LC S056V
DILLTQSPVILSVSPGERVSFSCRASQSIGTNIHWYQQRTNGSPRLLIKYASESIVGIPSRFSGSGSGTDFTLSINSVESEDIADYYCQQNNNWPTTFGAGTKLELK

SEQ ID NO: 719 - protein, 107 aa, Artificial Sequence
  Variable LC S056W
DILLTQSPVILSVSPGERVSFSCRASQSIGTNIHWYQQRTNGSPRLLIKYASESIWGIPSRFSGSGSGTDFTLSINSVESEDIADYYCQQNNNWPTTFGAGTKLELK

SEQ ID NO: 720 - protein, 107 aa, Artificial Sequence
  Variable LC S056H
DILLTQSPVILSVSPGERVSFSCRASQSIGTNIHWYQQRTNGSPRLLIKYASESIHGIPSRFSGSGSGTDFTLSINSVESEDIADYYCQQNNNWPTTFGAGTKLELK

SEQ ID NO: 721 - protein, 107 aa, Artificial Sequence
  Variable LC S056R
DILLTQSPVILSVSPGERVSFSCRASQSIGTNIHWYQQRTNGSPRLLIKYASESIRGIPSRFSGSGSGTDFTLSINSVESEDIADYYCQQNNNWPTTFGAGTKLELK

SEQ ID NO: 722 - protein, 107 aa, Artificial Sequence
  Variable LC S056K
DILLTQSPVILSVSPGERVSFSCRASQSIGTNIHWYQQRTNGSPRLLIKYASESIKGIPSRFSGSGSGTDFTLSINSVESEDIADYYCQQNNNWPTTFGAGTKLELK

SEQ ID NO: 723 - protein, 107 aa, Artificial Sequence
  Variable LC Y086F
DILLTQSPVILSVSPGERVSFSCRASQSIGTNIHWYQQRTNGSPRLLIKYASESISGIPSRFSGSGSGTDFTLSINSVESEDIADFYCQQNNNWPTTFGAGTKLELK

SEQ ID NO: 724 - protein, 107 aa, Artificial Sequence
  Variable LC Y086M
DILLTQSPVILSVSPGERVSFSCRASQSIGTNIHWYQQRTNGSPRLLIKYASESISGIPSRFSGSGSGTDFTLSINSVESEDIADMYCQQNNNWPTTFGAGTKLELK

SEQ ID NO: 725 - protein, 107 aa, Artificial Sequence
  Variable LC Y086H
DILLTQSPVILSVSPGERVSFSCRASQSIGTNIHWYQQRTNGSPRLLIKYASESISGIPSRFSGSGSGTDFTLSINSVESEDIADHYCQQNNNWPTTFGAGTKLELK

SEQ ID NO: 726 - protein, 107 aa, Artificial Sequence
  Variable LC Y087L
DILLTQSPVILSVSPGERVSFSCRASQSIGTNIHWYQQRTNGSPRLLIKYASESISGIPSRFSGSGSGTDFTLSINSVESEDIADYLCQQNNNWPTTFGAGTKLELK

SEQ ID NO: 727 - protein, 107 aa, Artificial Sequence
  Variable LC Y087C
DILLTQSPVILSVSPGERVSFSCRASQSIGTNIHWYQQRTNGSPRLLIKYASESISGIPSRFSGSGSGTDFTLSINSVESEDIADYCCQQNNNWPTTFGAGTKLELK

SEQ ID NO: 728 - protein, 107 aa, Artificial Sequence
  Variable LC Y087D
DILLTQSPVILSVSPGERVSFSCRASQSIGTNIHWYQQRTNGSPRLLIKYASESISGIPSRFSGSGSGTDFTLSINSVESEDIADYDCQQNNNWPTTFGAGTKLELK

SEQ ID NO: 729 - protein, 107 aa, Artificial Sequence
  Variable LC Y087F
DILLTQSPVILSVSPGERVSFSCRASQSIGTNIHWYQQRTNGSPRLLIKYASESISGIPSRFSGSGSGTDFTLSINSVESEDIADYFCQQNNNWPTTFGAGTKLELK

SEQ ID NO: 730 - protein, 107 aa, Artificial Sequence
  Variable LC Y087G
DILLTQSPVILSVSPGERVSFSCRASQSIGTNIHWYQQRTNGSPRLLIKYASESISGIPSRFSGSGSGTDFTLSINSVESEDIADYGCQQNNNWPTTFGAGTKLELK

SEQ ID NO: 731 - protein, 107 aa, Artificial Sequence
  Variable LC Y087I
DILLTQSPVILSVSPGERVSFSCRASQSIGTNIHWYQQRTNGSPRLLIKYASESISGIPSRFSGSGSGTDFTLSINSVESEDIADYICQQNNNWPTTFGAGTKLELK

SEQ ID NO: 732 - protein, 107 aa, Artificial Sequence
  Variable LC Y087N
DILLTQSPVILSVSPGERVSFSCRASQSIGTNIHWYQQRTNGSPRLLIKYASESISGIPSRFSGSGSGTDFTLSINSVESEDIADYNCQQNNNWPTTFGAGTKLELK

SEQ ID NO: 733 - protein, 107 aa, Artificial Sequence
  Variable LC Y087P
DILLTQSPVILSVSPGERVSFSCRASQSIGTNIHWYQQRTNGSPRLLIKYASESISGIPSRFSGSGSGTDFTLSINSVESEDIADYPCQQNNNWPTTFGAGTKLELK

SEQ ID NO: 734 - protein, 107 aa, Artificial Sequence
  Variable LC Y087S
DILLTQSPVILSVSPGERVSFSCRASQSIGTNIHWYQQRTNGSPRLLIKYASESISGIPSRFSGSGSGTDFTLSINSVESEDIADYSCQQNNNWPTTFGAGTKLELK

SEQ ID NO: 735 - protein, 107 aa, Artificial Sequence
  Variable LC Y087T
DILLTQSPVILSVSPGERVSFSCRASQSIGTNIHWYQQRTNGSPRLLIKYASESISGIPSRFSGSGSGTDFTLSINSVESEDIADYTCQQNNNWPTTFGAGTKLELK

SEQ ID NO: 736 - protein, 107 aa, Artificial Sequence
  Variable LC Y087V
DILLTQSPVILSVSPGERVSFSCRASQSIGTNIHWYQQRTNGSPRLLIKYASESISGIPSRFSGSGSGTDFTLSINSVESEDIADYVCQQNNNWPTTFGAGTKLELK

SEQ ID NO: 737 - protein, 107 aa, Artificial Sequence
  Variable LC Y087W
DILLTQSPVILSVSPGERVSFSCRASQSIGTNIHWYQQRTNGSPRLLIKYASESISGIPSRFSGSGSGTDFTLSINSVESEDIADYWCQQNNNWPTTFGAGTKLELK

SEQ ID NO: 738 - protein, 107 aa, Artificial Sequence
  Variable LC Y087K
DILLTQSPVILSVSPGERVSFSCRASQSIGTNIHWYQQRTNGSPRLLIKYASESISGIPSRFSGSGSGTDFTLSINSVESEDIADYKCQQNNNWPTTFGAGTKLELK

SEQ ID NO: 739 - protein, 107 aa, Artificial Sequence
  Variable LC Y087H
DILLTQSPVILSVSPGERVSFSCRASQSIGTNIHWYQQRTNGSPRLLIKYASESISGIPSRFSGSGSGTDFTLSINSVESEDIADYHCQQNNNWPTTFGAGTKLELK

SEQ ID NO: 740 - protein, 107 aa, Artificial Sequence
  Variable LC Y087R
DILLTQSPVILSVSPGERVSFSCRASQSIGTNIHWYQQRTNGSPRLLIKYASESISGIPSRFSGSGSGTDFTLSINSVESEDIADYRCQQNNNWPTTFGAGTKLELK

SEQ ID NO: 741 - protein, 107 aa, Artificial Sequence
  Variable LC Q089E
DILLTQSPVILSVSPGERVSFSCRASQSIGTNIHWYQQRTNGSPRLLIKYASESISGIPSRFSGSGSGTDFTLSINSVESEDIADYYCEQNNNWPTTFGAGTKLELK

SEQ ID NO: 742 - protein, 107 aa, Artificial Sequence
  Variable LC N091L
DILLTQSPVILSVSPGERVSFSCRASQSIGTNIHWYQQRTNGSPRLLIKYASESISGIPSRFSGSGSGTDFTLSINSVESEDIADYYCQQLNNWPTTFGAGTKLELK

SEQ ID NO: 743 - protein, 107 aa, Artificial Sequence
  Variable LC N091A
DILLTQSPVILSVSPGERVSFSCRASQSIGTNIHWYQQRTNGSPRLLIKYASESISGIPSRFSGSGSGTDFTLSINSVESEDIADYYCQQANNWPTTFGAGTKLELK

SEQ ID NO: 744 - protein, 107 aa, Artificial Sequence
  Variable LC N091C
DILLTQSPVILSVSPGERVSFSCRASQSIGTNIHWYQQRTNGSPRLLIKYASESISGIPSRFSGSGSGTDFTLSINSVESEDIADYYCQQCNNWPTTFGAGTKLELK

SEQ ID NO: 745 - protein, 107 aa, Artificial Sequence
  Variable LC N091I
DILLTQSPVILSVSPGERVSFSCRASQSIGTNIHWYQQRTNGSPRLLIKYASESISGIPSRFSGSGSGTDFTLSINSVESEDIADYYCQQINNWPTTFGAGTKLELK

SEQ ID NO: 746 - protein, 107 aa, Artificial Sequence
  Variable LC N091M
DILLTQSPVILSVSPGERVSFSCRASQSIGTNIHWYQQRTNGSPRLLIKYASESISGIPSRFSGSGSGTDFTLSINSVESEDIADYYCQQMNNWPTTFGAGTKLELK

SEQ ID NO: 747 - protein, 107 aa, Artificial Sequence
  Variable LC N091S
DILLTQSPVILSVSPGERVSFSCRASQSIGTNIHWYQQRTNGSPRLLIKYASESISGIPSRFSGSGSGTDFTLSINSVESEDIADYYCQQSNNWPTTFGAGTKLELK

SEQ ID NO: 748 - protein, 107 aa, Artificial Sequence
  Variable LC N091T
DILLTQSPVILSVSPGERVSFSCRASQSIGTNIHWYQQRTNGSPRLLIKYASESISGIPSRFSGSGSGTDFTLSINSVESEDIADYYCQQTNNWPTTFGAGTKLELK

SEQ ID NO: 749 - protein, 107 aa, Artificial Sequence
  Variable LC N091V
DILLTQSPVILSVSPGERVSFSCRASQSIGTNIHWYQQRTNGSPRLLIKYASESISGIPSRFSGSGSGTDFTLSINSVESEDIADYYCQQVNNWPTTFGAGTKLELK

SEQ ID NO: 750 - protein, 107 aa, Artificial Sequence
  Variable LC N091H
DILLTQSPVILSVSPGERVSFSCRASQSIGTNIHWYQQRTNGSPRLLIKYASESISGIPSRFSGSGSGTDFTLSINSVESEDIADYYCQQHNNWPTTFGAGTKLELK

SEQ ID NO: 751 - protein, 107 aa, Artificial Sequence
  Variable LC N091R
DILLTQSPVILSVSPGERVSFSCRASQSIGTNIHWYQQRTNGSPRLLIKYASESISGIPSRFSGSGSGTDFTLSINSVESEDIADYYCQQRNNWPTTFGAGTKLELK

SEQ ID NO: 752 - protein, 107 aa, Artificial Sequence
  Variable LC N092C
DILLTQSPVILSVSPGERVSFSCRASQSIGTNIHWYQQRTNGSPRLLIKYASESISGIPSRFSGSGSGTDFTLSINSVESEDIADYYCQQNCNWPTTFGAGTKLELK

SEQ ID NO: 753 - protein, 107 aa, Artificial Sequence
  Variable LC N092D
DILLTQSPVILSVSPGERVSFSCRASQSIGTNIHWYQQRTNGSPRLLIKYASESISGIPSRFSGSGSGTDFTLSINSVESEDIADYYCQQNDNWPTTFGAGTKLELK

SEQ ID NO: 754 - protein, 107 aa, Artificial Sequence
  Variable LC N092L
DILLTQSPVILSVSPGERVSFSCRASQSIGTNIHWYQQRTNGSPRLLIKYASESISGIPSRFSGSGSGTDFTLSINSVESEDIADYYCQQNLNWPTTFGAGTKLELK

SEQ ID NO: 755 - protein, 107 aa, Artificial Sequence
  Variable LC N092M
DILLTQSPVILSVSPGERVSFSCRASQSIGTNIHWYQQRTNGSPRLLIKYASESISGIPSRFSGSGSGTDFTLSINSVESEDIADYYCQQNMNWPTTFGAGTKLELK

SEQ ID NO: 756 - protein, 107 aa, Artificial Sequence
  Variable LC N092S
DILLTQSPVILSVSPGERVSFSCRASQSIGTNIHWYQQRTNGSPRLLIKYASESISGIPSRFSGSGSGTDFTLSINSVESEDIADYYCQQNSNWPTTFGAGTKLELK

SEQ ID NO: 757 - protein, 107 aa, Artificial Sequence
  Variable LC N092T
DILLTQSPVILSVSPGERVSFSCRASQSIGTNIHWYQQRTNGSPRLLIKYASESISGIPSRFSGSGSGTDFTLSINSVESEDIADYYCQQNTNWPTTFGAGTKLELK

SEQ ID NO: 758 - protein, 107 aa, Artificial Sequence
  Variable LC N092V
DILLTQSPVILSVSPGERVSFSCRASQSIGTNIHWYQQRTNGSPRLLIKYASESISGIPSRFSGSGSGTDFTLSINSVESEDIADYYCQQNVNWPTTFGAGTKLELK

SEQ ID NO: 759 - protein, 107 aa, Artificial Sequence
  Variable LC N092W
DILLTQSPVILSVSPGERVSFSCRASQSIGTNIHWYQQRTNGSPRLLIKYASESISGIPSRFSGSGSGTDFTLSINSVESEDIADYYCQQNWNWPTTFGAGTKLELK

SEQ ID NO: 760 - protein, 107 aa, Artificial Sequence
  Variable LC N092Y
DILLTQSPVILSVSPGERVSFSCRASQSIGTNIHWYQQRTNGSPRLLIKYASESISGIPSRFSGSGSGTDFTLSINSVESEDIADYYCQQNYNWPTTFGAGTKLELK

SEQ ID NO: 761 - protein, 107 aa, Artificial Sequence
  Variable LC N092H
DILLTQSPVILSVSPGERVSFSCRASQSIGTNIHWYQQRTNGSPRLLIKYASESISGIPSRFSGSGSGTDFTLSINSVESEDIADYYCQQNHNWPTTFGAGTKLELK

SEQ ID NO: 762 - protein, 107 aa, Artificial Sequence
  Variable LC N092K
DILLTQSPVILSVSPGERVSFSCRASQSIGTNIHWYQQRTNGSPRLLIKYASESISGIPSRFSGSGSGTDFTLSINSVESEDIADYYCQQNKNWPTTFGAGTKLELK

SEQ ID NO: 763 - protein, 107 aa, Artificial Sequence
  Variable LC N092R
DILLTQSPVILSVSPGERVSFSCRASQSIGTNIHWYQQRTNGSPRLLIKYASESISGIPSRFSGSGSGTDFTLSINSVESEDIADYYCQQNRNWPTTFGAGTKLELK

SEQ ID NO: 764 - protein, 107 aa, Artificial Sequence
  Variable LC N093T
DILLTQSPVILSVSPGERVSFSCRASQSIGTNIHWYQQRTNGSPRLLIKYASESISGIPSRFSGSGSGTDFTLSINSVESEDIADYYCQQNNTWPTTFGAGTKLELK

SEQ ID NO: 765 - protein, 107 aa, Artificial Sequence
  Variable LC T096L
DILLTQSPVILSVSPGERVSFSCRASQSIGTNIHWYQQRTNGSPRLLIKYASESISGIPSRFSGSGSGTDFTLSINSVESEDIADYYCQQNNNWPLTFGAGTKLELK

SEQ ID NO: 766 - protein, 107 aa, Artificial Sequence
  Variable LC T096C
DILLTQSPVILSVSPGERVSFSCRASQSIGTNIHWYQQRTNGSPRLLIKYASESISGIPSRFSGSGSGTDFTLSINSVESEDIADYYCQQNNNWPCTFGAGTKLELK

SEQ ID NO: 767 - protein, 107 aa, Artificial Sequence
  Variable LC T096M
DILLTQSPVILSVSPGERVSFSCRASQSIGTNIHWYQQRTNGSPRLLIKYASESISGIPSRFSGSGSGTDFTLSINSVESEDIADYYCQQNNNWPMTFGAGTKLELK

SEQ ID NO: 768 - protein, 107 aa, Artificial Sequence
  Variable LC T096V
DILLTQSPVILSVSPGERVSFSCRASQSIGTNIHWYQQRTNGSPRLLIKYASESISGIPSRFSGSGSGTDFTLSINSVESEDIADYYCQQNNNWPVTFGAGTKLELK

SEQ ID NO: 769 - protein, 107 aa, Artificial Sequence
  Variable LC	T097L
DILLTQSPVILSVSPGERVSFSCRASQSIGTNIHWYQQRTNGSPRLLIKYASESISGIPSRFSGSGSGTDFTLSINSVESEDIADYYCQQNNNWPTLFGAGTKLELK

SEQ ID NO: 770 - protein, 107 aa, Artificial Sequence
  Variable LC T097A
DILLTQSPVILSVSPGERVSFSCRASQSIGTNIHWYQQRTNGSPRLLIKYASESISGIPSRFSGSGSGTDFTLSINSVESEDIADYYCQQNNNWPTAFGAGTKLELK

SEQ ID NO: 771 - protein, 107 aa, Artificial Sequence
  Variable LC T097D
DILLTQSPVILSVSPGERVSFSCRASQSIGTNIHWYQQRTNGSPRLLIKYASESISGIPSRFSGSGSGTDFTLSINSVESEDIADYYCQQNNNWPTDFGAGTKLELK

SEQ ID NO: 772 - protein, 107 aa, Artificial Sequence
  Variable LC T097G
DILLTQSPVILSVSPGERVSFSCRASQSIGTNIHWYQQRTNGSPRLLIKYASESISGIPSRFSGSGSGTDFTLSINSVESEDIADYYCQQNNNWPTGFGAGTKLELK

SEQ ID NO: 773 - protein, 107 aa, Artificial Sequence
  Variable LC T097Q
DILLTQSPVILSVSPGERVSFSCRASQSIGTNIHWYQQRTNGSPRLLIKYASESISGIPSRFSGSGSGTDFTLSINSVESEDIADYYCQQNNNWPTQFGAGTKLELK

SEQ ID NO: 774 - protein, 107 aa, Artificial Sequence
  Variable LC T097S
DILLTQSPVILSVSPGERVSFSCRASQSIGTNIHWYQQRTNGSPRLLIKYASESISGIPSRFSGSGSGTDFTLSINSVESEDIADYYCQQNNNWPTSFGAGTKLELK

SEQ ID NO: 775 - protein, 107 aa, Artificial Sequence
  Variable LC T097V
DILLTQSPVILSVSPGERVSFSCRASQSIGTNIHWYQQRTNGSPRLLIKYASESISGIPSRFSGSGSGTDFTLSINSVESEDIADYYCQQNNNWPTVFGAGTKLELK

SEQ ID NO: 776 - protein, 107 aa, Artificial Sequence
  Variable LC T097K
DILLTQSPVILSVSPGERVSFSCRASQSIGTNIHWYQQRTNGSPRLLIKYASESISGIPSRFSGSGSGTDFTLSINSVESEDIADYYCQQNNNWPTKFGAGTKLELK

SEQ ID NO: 777 - protein, 107 aa, Artificial Sequence
  Variable LC T097R
DILLTQSPVILSVSPGERVSFSCRASQSIGTNIHWYQQRTNGSPRLLIKYASESISGIPSRFSGSGSGTDFTLSINSVESEDIADYYCQQNNNWPTRFGAGTKLELK

SEQ ID NO: 778 - protein, 107 aa, Artificial Sequence
  Variable LC F098A
DILLTQSPVILSVSPGERVSFSCRASQSIGTNIHWYQQRTNGSPRLLIKYASESISGIPSRFSGSGSGTDFTLSINSVESEDIADYYCQQNNNWPTTAGAGTKLELK

SEQ ID NO: 779 - protein, 107 aa, Artificial Sequence
  Variable LC F098M
DILLTQSPVILSVSPGERVSFSCRASQSIGTNIHWYQQRTNGSPRLLIKYASESISGIPSRFSGSGSGTDFTLSINSVESEDIADYYCQQNNNWPTTMGAGTKLELK

SEQ ID NO: 780 - protein, 107 aa, Artificial Sequence
  Variable LC F098S
DILLTQSPVILSVSPGERVSFSCRASQSIGTNIHWYQQRTNGSPRLLIKYASESISGIPSRFSGSGSGTDFTLSINSVESEDIADYYCQQNNNWPTTSGAGTKLELK

SEQ ID NO: 781 - protein, 107 aa, Artificial Sequence
  Variable LC F098V
DILLTQSPVILSVSPGERVSFSCRASQSIGTNIHWYQQRTNGSPRLLIKYASESISGIPSRFSGSGSGTDFTLSINSVESEDIADYYCQQNNNWPTTVGAGTKLELK

SEQ ID NO: 782 - protein, 107 aa, Artificial Sequence
  Variable LC F098Y
DILLTQSPVILSVSPGERVSFSCRASQSIGTNIHWYQQRTNGSPRLLIKYASESISGIPSRFSGSGSGTDFTLSINSVESEDIADYYCQQNNNWPTTYGAGTKLELK

SEQ ID NO: 783 - protein, 107 aa, Artificial Sequence
  Variable LC	G099L
DILLTQSPVILSVSPGERVSFSCRASQSIGTNIHWYQQRTNGSPRLLIKYASESISGIPSRFSGSGSGTDFTLSINSVESEDIADYYCQQNNNWPTTFLAGTKLELK

SEQ ID NO: 784 - protein, 107 aa, Artificial Sequence
  Variable LC	G099D
DILLTQSPVILSVSPGERVSFSCRASQSIGTNIHWYQQRTNGSPRLLIKYASESISGIPSRFSGSGSGTDFTLSINSVESEDIADYYCQQNNNWPTTFDAGTKLELK

SEQ ID NO: 785 - protein, 107 aa, Artificial Sequence
  Variable LC G099E
DILLTQSPVILSVSPGERVSFSCRASQSIGTNIHWYQQRTNGSPRLLIKYASESISGIPSRFSGSGSGTDFTLSINSVESEDIADYYCQQNNNWPTTFEAGTKLELK

SEQ ID NO: 786 - protein, 107 aa, Artificial Sequence
  Variable LC	G099F
DILLTQSPVILSVSPGERVSFSCRASQSIGTNIHWYQQRTNGSPRLLIKYASESISGIPSRFSGSGSGTDFTLSINSVESEDIADYYCQQNNNWPTTFFAGTKLELK

SEQ ID NO: 787 - protein, 107 aa, Artificial Sequence
  Variable LC	G099I
DILLTQSPVILSVSPGERVSFSCRASQSIGTNIHWYQQRTNGSPRLLIKYASESISGIPSRFSGSGSGTDFTLSINSVESEDIADYYCQQNNNWPTTFIAGTKLELK

SEQ ID NO: 788 - protein, 107 aa, Artificial Sequence
  Variable LC G099M
DILLTQSPVILSVSPGERVSFSCRASQSIGTNIHWYQQRTNGSPRLLIKYASESISGIPSRFSGSGSGTDFTLSINSVESEDIADYYCQQNNNWPTTFMAGTKLELK

SEQ ID NO: 789 - protein, 107 aa, Artificial Sequence
  Variable LC	G099N
DILLTQSPVILSVSPGERVSFSCRASQSIGTNIHWYQQRTNGSPRLLIKYASESISGIPSRFSGSGSGTDFTLSINSVESEDIADYYCQQNNNWPTTFNAGTKLELK

SEQ ID NO: 790 - protein, 107 aa, Artificial Sequence
  Variable LC G099S
DILLTQSPVILSVSPGERVSFSCRASQSIGTNIHWYQQRTNGSPRLLIKYASESISGIPSRFSGSGSGTDFTLSINSVESEDIADYYCQQNNNWPTTFSAGTKLELK

SEQ ID NO: 791 - protein, 107 aa, Artificial Sequence
  Variable LC G099T
DILLTQSPVILSVSPGERVSFSCRASQSIGTNIHWYQQRTNGSPRLLIKYASESISGIPSRFSGSGSGTDFTLSINSVESEDIADYYCQQNNNWPTTFTAGTKLELK

SEQ ID NO: 792 - protein, 107 aa, Artificial Sequence
  Variable LC G099V
DILLTQSPVILSVSPGERVSFSCRASQSIGTNIHWYQQRTNGSPRLLIKYASESISGIPSRFSGSGSGTDFTLSINSVESEDIADYYCQQNNNWPTTFVAGTKLELK

SEQ ID NO: 793 - protein, 107 aa, Artificial Sequence
  Variable LC G099K
DILLTQSPVILSVSPGERVSFSCRASQSIGTNIHWYQQRTNGSPRLLIKYASESISGIPSRFSGSGSGTDFTLSINSVESEDIADYYCQQNNNWPTTFKAGTKLELK

SEQ ID NO: 794 - protein, 107 aa, Artificial Sequence
  Variable LC G099H
DILLTQSPVILSVSPGERVSFSCRASQSIGTNIHWYQQRTNGSPRLLIKYASESISGIPSRFSGSGSGTDFTLSINSVESEDIADYYCQQNNNWPTTFHAGTKLELK

SEQ ID NO: 795 - protein, 107 aa, Artificial Sequence
  Variable LC A100C
DILLTQSPVILSVSPGERVSFSCRASQSIGTNIHWYQQRTNGSPRLLIKYASESISGIPSRFSGSGSGTDFTLSINSVESEDIADYYCQQNNNWPTTFGCGTKLELK

SEQ ID NO: 796 - protein, 107 aa, Artificial Sequence
  Variable LC A100D
DILLTQSPVILSVSPGERVSFSCRASQSIGTNIHWYQQRTNGSPRLLIKYASESISGIPSRFSGSGSGTDFTLSINSVESEDIADYYCQQNNNWPTTFGDGTKLELK

SEQ ID NO: 797 - protein, 107 aa, Artificial Sequence
  Variable LC A100E
DILLTQSPVILSVSPGERVSFSCRASQSIGTNIHWYQQRTNGSPRLLIKYASESISGIPSRFSGSGSGTDFTLSINSVESEDIADYYCQQNNNWPTTFGEGTKLELK

SEQ ID NO: 798 - protein, 107 aa, Artificial Sequence
  Variable LC A100F
DILLTQSPVILSVSPGERVSFSCRASQSIGTNIHWYQQRTNGSPRLLIKYASESISGIPSRFSGSGSGTDFTLSINSVESEDIADYYCQQNNNWPTTFGFGTKLELK

SEQ ID NO: 799 - protein, 107 aa, Artificial Sequence
  Variable LC A100I
DILLTQSPVILSVSPGERVSFSCRASQSIGTNIHWYQQRTNGSPRLLIKYASESISGIPSRFSGSGSGTDFTLSINSVESEDIADYYCQQNNNWPTTFGIGTKLELK

SEQ ID NO: 800 - protein, 107 aa, Artificial Sequence
  Variable LC A100M
DILLTQSPVILSVSPGERVSFSCRASQSIGTNIHWYQQRTNGSPRLLIKYASESISGIPSRFSGSGSGTDFTLSINSVESEDIADYYCQQNNNWPTTFGMGTKLELK

SEQ ID NO: 801 - protein, 107 aa, Artificial Sequence
  Variable LC A100N
DILLTQSPVILSVSPGERVSFSCRASQSIGTNIHWYQQRTNGSPRLLIKYASESISGIPSRFSGSGSGTDFTLSINSVESEDIADYYCQQNNNWPTTFGNGTKLELK

SEQ ID NO: 802 - protein, 107 aa, Artificial Sequence
  Variable LC	A100P
DILLTQSPVILSVSPGERVSFSCRASQSIGTNIHWYQQRTNGSPRLLIKYASESISGIPSRFSGSGSGTDFTLSINSVESEDIADYYCQQNNNWPTTFGPGTKLELK

SEQ ID NO: 803 - protein, 107 aa, Artificial Sequence
  Variable LC A100T
DILLTQSPVILSVSPGERVSFSCRASQSIGTNIHWYQQRTNGSPRLLIKYASESISGIPSRFSGSGSGTDFTLSINSVESEDIADYYCQQNNNWPTTFGTGTKLELK

SEQ ID NO: 804 - protein, 107 aa, Artificial Sequence
  Variable LC A100V
DILLTQSPVILSVSPGERVSFSCRASQSIGTNIHWYQQRTNGSPRLLIKYASESISGIPSRFSGSGSGTDFTLSINSVESEDIADYYCQQNNNWPTTFGVGTKLELK

SEQ ID NO: 805 - protein, 107 aa, Artificial Sequence
  Variable LC	A100W
DILLTQSPVILSVSPGERVSFSCRASQSIGTNIHWYQQRTNGSPRLLIKYASESISGIPSRFSGSGSGTDFTLSINSVESEDIADYYCQQNNNWPTTFGWGTKLELK

SEQ ID NO: 806 - protein, 107 aa, Artificial Sequence
  Variable LC A100Y
DILLTQSPVILSVSPGERVSFSCRASQSIGTNIHWYQQRTNGSPRLLIKYASESISGIPSRFSGSGSGTDFTLSINSVESEDIADYYCQQNNNWPTTFGYGTKLELK

SEQ ID NO: 807 - protein, 107 aa, Artificial Sequence
  Variable LC	A100K
DILLTQSPVILSVSPGERVSFSCRASQSIGTNIHWYQQRTNGSPRLLIKYASESISGIPSRFSGSGSGTDFTLSINSVESEDIADYYCQQNNNWPTTFGKGTKLELK

SEQ ID NO: 808 - protein, 107 aa, Artificial Sequence
  Variable LC A100H
DILLTQSPVILSVSPGERVSFSCRASQSIGTNIHWYQQRTNGSPRLLIKYASESISGIPSRFSGSGSGTDFTLSINSVESEDIADYYCQQNNNWPTTFGHGTKLELK

SEQ ID NO: 809 - protein, 107 aa, Artificial Sequence
  Variable LC	A100R
DILLTQSPVILSVSPGERVSFSCRASQSIGTNIHWYQQRTNGSPRLLIKYASESISGIPSRFSGSGSGTDFTLSINSVESEDIADYYCQQNNNWPTTFGRGTKLELK

SEQ ID NO: 810 - protein, 107 aa, Artificial Sequence
  Reference Variable LC D001W
WILLTQSPVILSVSPGERVSFSCRASQSIGTNIHWYQQRTNGSPRLLIKYASESISGIPSRFSGSGSGTDFTLSINSVESEDIADYYCQQNNNWPTTFGQGTKLELK

SEQ ID NO: 811 - protein, 107 aa, Artificial Sequence
  Reference Variable LC I002C
DCLLTQSPVILSVSPGERVSFSCRASQSIGTNIHWYQQRTNGSPRLLIKYASESISGIPSRFSGSGSGTDFTLSINSVESEDIADYYCQQNNNWPTTFGQGTKLELK

SEQ ID NO: 812 - protein, 107 aa, Artificial Sequence
  Reference Variable LC I002V
DVLLTQSPVILSVSPGERVSFSCRASQSIGTNIHWYQQRTNGSPRLLIKYASESISGIPSRFSGSGSGTDFTLSINSVESEDIADYYCQQNNNWPTTFGQGTKLELK

SEQ ID NO: 813 - protein, 107 aa, Artificial Sequence
  Reference Variable LC I002W
DWLLTQSPVILSVSPGERVSFSCRASQSIGTNIHWYQQRTNGSPRLLIKYASESISGIPSRFSGSGSGTDFTLSINSVESEDIADYYCQQNNNWPTTFGQGTKLELK

SEQ ID NO: 814 - protein, 107 aa, Artificial Sequence
  Reference Variable LC L003D
DIDLTQSPVILSVSPGERVSFSCRASQSIGTNIHWYQQRTNGSPRLLIKYASESISGIPSRFSGSGSGTDFTLSINSVESEDIADYYCQQNNNWPTTFGQGTKLELK

SEQ ID NO: 815 - protein, 107 aa, Artificial Sequence
  Reference Variable LC L003F
DIFLTQSPVILSVSPGERVSFSCRASQSIGTNIHWYQQRTNGSPRLLIKYASESISGIPSRFSGSGSGTDFTLSINSVESEDIADYYCQQNNNWPTTFGQGTKLELK

SEQ ID NO: 816 - protein, 107 aa, Artificial Sequence
  Reference Variable LC L003G
DIGLTQSPVILSVSPGERVSFSCRASQSIGTNIHWYQQRTNGSPRLLIKYASESISGIPSRFSGSGSGTDFTLSINSVESEDIADYYCQQNNNWPTTFGQGTKLELK

SEQ ID NO: 817 - protein, 107 aa, Artificial Sequence
  Reference Variable LC L003S
DISLTQSPVILSVSPGERVSFSCRASQSIGTNIHWYQQRTNGSPRLLIKYASESISGIPSRFSGSGSGTDFTLSINSVESEDIADYYCQQNNNWPTTFGQGTKLELK

SEQ ID NO: 818 - protein, 107 aa, Artificial Sequence
  Reference Variable LC L003T
DITLTQSPVILSVSPGERVSFSCRASQSIGTNIHWYQQRTNGSPRLLIKYASESISGIPSRFSGSGSGTDFTLSINSVESEDIADYYCQQNNNWPTTFGQGTKLELK

SEQ ID NO: 819 - protein, 107 aa, Artificial Sequence
  Reference Variable LC L003V
DIVLTQSPVILSVSPGERVSFSCRASQSIGTNIHWYQQRTNGSPRLLIKYASESISGIPSRFSGSGSGTDFTLSINSVESEDIADYYCQQNNNWPTTFGQGTKLELK

SEQ ID NO: 820 - protein, 107 aa, Artificial Sequence
  Reference Variable LC L003W
DIWLTQSPVILSVSPGERVSFSCRASQSIGTNIHWYQQRTNGSPRLLIKYASESISGIPSRFSGSGSGTDFTLSINSVESEDIADYYCQQNNNWPTTFGQGTKLELK

SEQ ID NO: 821 - protein, 107 aa, Artificial Sequence
  Reference Variable LC L003Y
DIYLTQSPVILSVSPGERVSFSCRASQSIGTNIHWYQQRTNGSPRLLIKYASESISGIPSRFSGSGSGTDFTLSINSVESEDIADYYCQQNNNWPTTFGQGTKLELK

SEQ ID NO: 822 - protein, 107 aa, Artificial Sequence
  Reference Variable LC L003R
DIRLTQSPVILSVSPGERVSFSCRASQSIGTNIHWYQQRTNGSPRLLIKYASESISGIPSRFSGSGSGTDFTLSINSVESEDIADYYCQQNNNWPTTFGQGTKLELK

SEQ ID NO: 823 - protein, 107 aa, Artificial Sequence
  Reference Variable LC L004C
DILCTQSPVILSVSPGERVSFSCRASQSIGTNIHWYQQRTNGSPRLLIKYASESISGIPSRFSGSGSGTDFTLSINSVESEDIADYYCQQNNNWPTTFGQGTKLELK

SEQ ID NO: 824 - protein, 107 aa, Artificial Sequence
  Reference Variable LC L004E
DILETQSPVILSVSPGERVSFSCRASQSIGTNIHWYQQRTNGSPRLLIKYASESISGIPSRFSGSGSGTDFTLSINSVESEDIADYYCQQNNNWPTTFGQGTKLELK

SEQ ID NO: 825 - protein, 107 aa, Artificial Sequence
  Reference Variable LC L004F
DILFTQSPVILSVSPGERVSFSCRASQSIGTNIHWYQQRTNGSPRLLIKYASESISGIPSRFSGSGSGTDFTLSINSVESEDIADYYCQQNNNWPTTFGQGTKLELK

SEQ ID NO: 826 - protein, 107 aa, Artificial Sequence
  Reference Variable LC L004I
DILITQSPVILSVSPGERVSFSCRASQSIGTNIHWYQQRTNGSPRLLIKYASESISGIPSRFSGSGSGTDFTLSINSVESEDIADYYCQQNNNWPTTFGQGTKLELK

SEQ ID NO: 827 - protein, 107 aa, Artificial Sequence
  Reference Variable LC L004P
DILPTQSPVILSVSPGERVSFSCRASQSIGTNIHWYQQRTNGSPRLLIKYASESISGIPSRFSGSGSGTDFTLSINSVESEDIADYYCQQNNNWPTTFGQGTKLELK

SEQ ID NO: 828 - protein, 107 aa, Artificial Sequence
  Reference Variable LC L004S
DILSTQSPVILSVSPGERVSFSCRASQSIGTNIHWYQQRTNGSPRLLIKYASESISGIPSRFSGSGSGTDFTLSINSVESEDIADYYCQQNNNWPTTFGQGTKLELK

SEQ ID NO: 829 - protein, 107 aa, Artificial Sequence
  Reference Variable LC L004T
DILTTQSPVILSVSPGERVSFSCRASQSIGTNIHWYQQRTNGSPRLLIKYASESISGIPSRFSGSGSGTDFTLSINSVESEDIADYYCQQNNNWPTTFGQGTKLELK

SEQ ID NO: 830 - protein, 107 aa, Artificial Sequence
  Reference Variable LC L004V
DILVTQSPVILSVSPGERVSFSCRASQSIGTNIHWYQQRTNGSPRLLIKYASESISGIPSRFSGSGSGTDFTLSINSVESEDIADYYCQQNNNWPTTFGQGTKLELK

SEQ ID NO: 831 - protein, 107 aa, Artificial Sequence
  Reference Variable LC L004W
DILWTQSPVILSVSPGERVSFSCRASQSIGTNIHWYQQRTNGSPRLLIKYASESISGIPSRFSGSGSGTDFTLSINSVESEDIADYYCQQNNNWPTTFGQGTKLELK

SEQ ID NO: 832 - protein, 107 aa, Artificial Sequence
  Reference Variable LC L004K
DILKTQSPVILSVSPGERVSFSCRASQSIGTNIHWYQQRTNGSPRLLIKYASESISGIPSRFSGSGSGTDFTLSINSVESEDIADYYCQQNNNWPTTFGQGTKLELK

SEQ ID NO: 833 - protein, 107 aa, Artificial Sequence
  Reference Variable LC L004H
DILHTQSPVILSVSPGERVSFSCRASQSIGTNIHWYQQRTNGSPRLLIKYASESISGIPSRFSGSGSGTDFTLSINSVESEDIADYYCQQNNNWPTTFGQGTKLELK

SEQ ID NO: 834 - protein, 107 aa, Artificial Sequence
  Reference Variable LC L004R
DILRTQSPVILSVSPGERVSFSCRASQSIGTNIHWYQQRTNGSPRLLIKYASESISGIPSRFSGSGSGTDFTLSINSVESEDIADYYCQQNNNWPTTFGQGTKLELK

SEQ ID NO: 835 - protein, 107 aa, Artificial Sequence
  Reference Variable LC T005A
DILLAQSPVILSVSPGERVSFSCRASQSIGTNIHWYQQRTNGSPRLLIKYASESISGIPSRFSGSGSGTDFTLSINSVESEDIADYYCQQNNNWPTTFGQGTKLELK

SEQ ID NO: 836 - protein, 107 aa, Artificial Sequence
  Reference Variable LC T005C
DILLCQSPVILSVSPGERVSFSCRASQSIGTNIHWYQQRTNGSPRLLIKYASESISGIPSRFSGSGSGTDFTLSINSVESEDIADYYCQQNNNWPTTFGQGTKLELK

SEQ ID NO: 837 - protein, 107 aa, Artificial Sequence
  Reference Variable LC T005D
DILLDQSPVILSVSPGERVSFSCRASQSIGTNIHWYQQRTNGSPRLLIKYASESISGIPSRFSGSGSGTDFTLSINSVESEDIADYYCQQNNNWPTTFGQGTKLELK

SEQ ID NO: 838 - protein, 107 aa, Artificial Sequence
  Reference Variable LC T005E
DILLEQSPVILSVSPGERVSFSCRASQSIGTNIHWYQQRTNGSPRLLIKYASESISGIPSRFSGSGSGTDFTLSINSVESEDIADYYCQQNNNWPTTFGQGTKLELK

SEQ ID NO: 839 - protein, 107 aa, Artificial Sequence
  Reference Variable LC T005F
DILLFQSPVILSVSPGERVSFSCRASQSIGTNIHWYQQRTNGSPRLLIKYASESISGIPSRFSGSGSGTDFTLSINSVESEDIADYYCQQNNNWPTTFGQGTKLELK

SEQ ID NO: 840 - protein, 107 aa, Artificial Sequence
  Reference Variable LC T005G
DILLGQSPVILSVSPGERVSFSCRASQSIGTNIHWYQQRTNGSPRLLIKYASESISGIPSRFSGSGSGTDFTLSINSVESEDIADYYCQQNNNWPTTFGQGTKLELK

SEQ ID NO: 841 - protein, 107 aa, Artificial Sequence
  Reference Variable LC T005N
DILLNQSPVILSVSPGERVSFSCRASQSIGTNIHWYQQRTNGSPRLLIKYASESISGIPSRFSGSGSGTDFTLSINSVESEDIADYYCQQNNNWPTTFGQGTKLELK

SEQ ID NO: 842 - protein, 107 aa, Artificial Sequence
  Reference Variable LC T005S
DILLSQSPVILSVSPGERVSFSCRASQSIGTNIHWYQQRTNGSPRLLIKYASESISGIPSRFSGSGSGTDFTLSINSVESEDIADYYCQQNNNWPTTFGQGTKLELK

SEQ ID NO: 843 - protein, 107 aa, Artificial Sequence
  Reference Variable LC T005W
DILLWQSPVILSVSPGERVSFSCRASQSIGTNIHWYQQRTNGSPRLLIKYASESISGIPSRFSGSGSGTDFTLSINSVESEDIADYYCQQNNNWPTTFGQGTKLELK

SEQ ID NO: 844 - protein, 107 aa, Artificial Sequence
  Reference Variable LC T005L
DILLLQSPVILSVSPGERVSFSCRASQSIGTNIHWYQQRTNGSPRLLIKYASESISGIPSRFSGSGSGTDFTLSINSVESEDIADYYCQQNNNWPTTFGQGTKLELK

SEQ ID NO: 845 - protein, 107 aa, Artificial Sequence
  Reference Variable LC T005K
DILLKQSPVILSVSPGERVSFSCRASQSIGTNIHWYQQRTNGSPRLLIKYASESISGIPSRFSGSGSGTDFTLSINSVESEDIADYYCQQNNNWPTTFGQGTKLELK

SEQ ID NO: 846 - protein, 107 aa, Artificial Sequence
  Reference Variable LC T005H
DILLHQSPVILSVSPGERVSFSCRASQSIGTNIHWYQQRTNGSPRLLIKYASESISGIPSRFSGSGSGTDFTLSINSVESEDIADYYCQQNNNWPTTFGQGTKLELK

SEQ ID NO: 847 - protein, 107 aa, Artificial Sequence
  Reference Variable LC T005R
DILLRQSPVILSVSPGERVSFSCRASQSIGTNIHWYQQRTNGSPRLLIKYASESISGIPSRFSGSGSGTDFTLSINSVESEDIADYYCQQNNNWPTTFGQGTKLELK

SEQ ID NO: 848 - protein, 107 aa, Artificial Sequence
  Reference Variable LC R024A
DILLTQSPVILSVSPGERVSFSCAASQSIGTNIHWYQQRTNGSPRLLIKYASESISGIPSRFSGSGSGTDFTLSINSVESEDIADYYCQQNNNWPTTFGQGTKLELK

SEQ ID NO: 849 - protein, 107 aa, Artificial Sequence
  Reference Variable LC R024C
DILLTQSPVILSVSPGERVSFSCCASQSIGTNIHWYQQRTNGSPRLLIKYASESISGIPSRFSGSGSGTDFTLSINSVESEDIADYYCQQNNNWPTTFGQGTKLELK

SEQ ID NO: 850 - protein, 107 aa, Artificial Sequence
  Reference Variable LC R024F
DILLTQSPVILSVSPGERVSFSCFASQSIGTNIHWYQQRTNGSPRLLIKYASESISGIPSRFSGSGSGTDFTLSINSVESEDIADYYCQQNNNWPTTFGQGTKLELK

SEQ ID NO: 851 - protein, 107 aa, Artificial Sequence
  Reference Variable LC R024L
DILLTQSPVILSVSPGERVSFSCLASQSIGTNIHWYQQRTNGSPRLLIKYASESISGIPSRFSGSGSGTDFTLSINSVESEDIADYYCQQNNNWPTTFGQGTKLELK

SEQ ID NO: 852 - protein, 107 aa, Artificial Sequence
  Reference Variable LC R024M
DILLTQSPVILSVSPGERVSFSCMASQSIGTNIHWYQQRTNGSPRLLIKYASESISGIPSRFSGSGSGTDFTLSINSVESEDIADYYCQQNNNWPTTFGQGTKLELK

SEQ ID NO: 853 - protein, 107 aa, Artificial Sequence
  Reference Variable LC R024S
DILLTQSPVILSVSPGERVSFSCSASQSIGTNIHWYQQRTNGSPRLLIKYASESISGIPSRFSGSGSGTDFTLSINSVESEDIADYYCQQNNNWPTTFGQGTKLELK

SEQ ID NO: 854 - protein, 107 aa, Artificial Sequence
  Reference Variable LC R024W
DILLTQSPVILSVSPGERVSFSCWASQSIGTNIHWYQQRTNGSPRLLIKYASESISGIPSRFSGSGSGTDFTLSINSVESEDIADYYCQQNNNWPTTFGQGTKLELK

SEQ ID NO: 855 - protein, 107 aa, Artificial Sequence
  Reference Variable LC R024Y
DILLTQSPVILSVSPGERVSFSCYASQSIGTNIHWYQQRTNGSPRLLIKYASESISGIPSRFSGSGSGTDFTLSINSVESEDIADYYCQQNNNWPTTFGQGTKLELK

SEQ ID NO: 856 - protein, 107 aa, Artificial Sequence
  Reference Variable LC A025C
DILLTQSPVILSVSPGERVSFSCRCSQSIGTNIHWYQQRTNGSPRLLIKYASESISGIPSRFSGSGSGTDFTLSINSVESEDIADYYCQQNNNWPTTFGQGTKLELK

SEQ ID NO: 857 - protein, 107 aa, Artificial Sequence
  Reference Variable	LC	A025G
DILLTQSPVILSVSPGERVSFSCRGSQSIGTNIHWYQQRTNGSPRLLIKYASESISGIPSRFSGSGSGTDFTLSINSVESEDIADYYCQQNNNWPTTFGQGTKLELK

SEQ ID NO: 858 - protein, 107 aa, Artificial Sequence
  Reference Variable LC A025L
DILLTQSPVILSVSPGERVSFSCRLSQSIGTNIHWYQQRTNGSPRLLIKYASESISGIPSRFSGSGSGTDFTLSINSVESEDIADYYCQQNNNWPTTFGQGTKLELK

SEQ ID NO: 859 - protein, 107 aa, Artificial Sequence
  Reference Variable LC A025V
DILLTQSPVILSVSPGERVSFSCRVSQSIGTNIHWYQQRTNGSPRLLIKYASESISGIPSRFSGSGSGTDFTLSINSVESEDIADYYCQQNNNWPTTFGQGTKLELK

SEQ ID NO: 860 - protein, 107 aa, Artificial Sequence
  Reference Variable LC S026A
DILLTQSPVILSVSPGERVSFSCRAAQSIGTNIHWYQQRTNGSPRLLIKYASESISGIPSRFSGSGSGTDFTLSINSVESEDIADYYCQQNNNWPTTFGQGTKLELK

SEQ ID NO: 861 - protein, 107 aa, Artificial Sequence
  Reference Variable	LC	S026C
DILLTQSPVILSVSPGERVSFSCRACQSIGTNIHWYQQRTNGSPRLLIKYASESISGIPSRFSGSGSGTDFTLSINSVESEDIADYYCQQNNNWPTTFGQGTKLELK

SEQ ID NO: 862 - protein, 107 aa, Artificial Sequence
  Reference Variable LC S026D
DILLTQSPVILSVSPGERVSFSCRADQSIGTNIHWYQQRTNGSPRLLIKYASESISGIPSRFSGSGSGTDFTLSINSVESEDIADYYCQQNNNWPTTFGQGTKLELK

SEQ ID NO: 863 - protein, 107 aa, Artificial Sequence
  Reference Variable LC S026I
DILLTQSPVILSVSPGERVSFSCRAIQSIGTNIHWYQQRTNGSPRLLIKYASESISGIPSRFSGSGSGTDFTLSINSVESEDIADYYCQQNNNWPTTFGQGTKLELK

SEQ ID NO: 864 - protein, 107 aa, Artificial Sequence
  Reference Variable LC S026M
DILLTQSPVILSVSPGERVSFSCRAMQSIGTNIHWYQQRTNGSPRLLIKYASESISGIPSRFSGSGSGTDFTLSINSVESEDIADYYCQQNNNWPTTFGQGTKLELK

SEQ ID NO: 865 - protein, 107 aa, Artificial Sequence
  Reference Variable LC S026N
DILLTQSPVILSVSPGERVSFSCRANQSIGTNIHWYQQRTNGSPRLLIKYASESISGIPSRFSGSGSGTDFTLSINSVESEDIADYYCQQNNNWPTTFGQGTKLELK

SEQ ID NO: 866 - protein, 107 aa, Artificial Sequence
  Reference Variable LC S026V
DILLTQSPVILSVSPGERVSFSCRAVQSIGTNIHWYQQRTNGSPRLLIKYASESISGIPSRFSGSGSGTDFTLSINSVESEDIADYYCQQNNNWPTTFGQGTKLELK

SEQ ID NO: 867 - protein, 107 aa, Artificial Sequence
  Reference Variable LC S026W
DILLTQSPVILSVSPGERVSFSCRAWQSIGTNIHWYQQRTNGSPRLLIKYASESISGIPSRFSGSGSGTDFTLSINSVESEDIADYYCQQNNNWPTTFGQGTKLELK

SEQ ID NO: 868 - protein, 107 aa, Artificial Sequence
  Reference Variable LC S026L
DILLTQSPVILSVSPGERVSFSCRALQSIGTNIHWYQQRTNGSPRLLIKYASESISGIPSRFSGSGSGTDFTLSINSVESEDIADYYCQQNNNWPTTFGQGTKLELK

SEQ ID NO: 869 - protein, 107 aa, Artificial Sequence
  Reference Variable LC S026G
DILLTQSPVILSVSPGERVSFSCRAGQSIGTNIHWYQQRTNGSPRLLIKYASESISGIPSRFSGSGSGTDFTLSINSVESEDIADYYCQQNNNWPTTFGQGTKLELK

SEQ ID NO: 870 - protein, 107 aa, Artificial Sequence
  Reference Variable LC S026H
DILLTQSPVILSVSPGERVSFSCRAHQSIGTNIHWYQQRTNGSPRLLIKYASESISGIPSRFSGSGSGTDFTLSINSVESEDIADYYCQQNNNWPTTFGQGTKLELK

SEQ ID NO: 871 - protein, 107 aa, Artificial Sequence
  Reference Variable LC S026R
DILLTQSPVILSVSPGERVSFSCRARQSIGTNIHWYQQRTNGSPRLLIKYASESISGIPSRFSGSGSGTDFTLSINSVESEDIADYYCQQNNNWPTTFGQGTKLELK

SEQ ID NO: 872 - protein, 107 aa, Artificial Sequence
  Reference Variable LC Q027A
DILLTQSPVILSVSPGERVSFSCRASASIGTNIHWYQQRTNGSPRLLIKYASESISGIPSRFSGSGSGTDFTLSINSVESEDIADYYCQQNNNWPTTFGQGTKLELK

SEQ ID NO: 873 - protein, 107 aa, Artificial Sequence
  Reference Variable LC Q027D
DILLTQSPVILSVSPGERVSFSCRASDSIGTNIHWYQQRTNGSPRLLIKYASESISGIPSRFSGSGSGTDFTLSINSVESEDIADYYCQQNNNWPTTFGQGTKLELK

SEQ ID NO: 874 - protein, 107 aa, Artificial Sequence
  Reference Variable LC Q027E
DILLTQSPVILSVSPGERVSFSCRASESIGTNIHWYQQRTNGSPRLLIKYASESISGIPSRFSGSGSGTDFTLSINSVESEDIADYYCQQNNNWPTTFGQGTKLELK

SEQ ID NO: 875 - protein, 107 aa, Artificial Sequence
  Reference Variable LC Q027F
DILLTQSPVILSVSPGERVSFSCRASFSIGTNIHWYQQRTNGSPRLLIKYASESISGIPSRFSGSGSGTDFTLSINSVESEDIADYYCQQNNNWPTTFGQGTKLELK

SEQ ID NO: 876 - protein, 107 aa, Artificial Sequence
  Reference Variable LC Q027I
DILLTQSPVILSVSPGERVSFSCRASISIGTNIHWYQQRTNGSPRLLIKYASESISGIPSRFSGSGSGTDFTLSINSVESEDIADYYCQQNNNWPTTFGQGTKLELK

SEQ ID NO: 877 - protein, 107 aa, Artificial Sequence
  Reference Variable LC Q027M
DILLTQSPVILSVSPGERVSFSCRASMSIGTNIHWYQQRTNGSPRLLIKYASESISGIPSRFSGSGSGTDFTLSINSVESEDIADYYCQQNNNWPTTFGQGTKLELK

SEQ ID NO: 878 - protein, 107 aa, Artificial Sequence
  Reference Variable LC Q027N
DILLTQSPVILSVSPGERVSFSCRASNSIGTNIHWYQQRTNGSPRLLIKYASESISGIPSRFSGSGSGTDFTLSINSVESEDIADYYCQQNNNWPTTFGQGTKLELK

SEQ ID NO: 879 - protein, 107 aa, Artificial Sequence
  Reference Variable LC Q027P
DILLTQSPVILSVSPGERVSFSCRASPSIGTNIHWYQQRTNGSPRLLIKYASESISGIPSRFSGSGSGTDFTLSINSVESEDIADYYCQQNNNWPTTFGQGTKLELK

SEQ ID NO: 880 - protein, 107 aa, Artificial Sequence
  Reference Variable LC Q027T
DILLTQSPVILSVSPGERVSFSCRASTSIGTNIHWYQQRTNGSPRLLIKYASESISGIPSRFSGSGSGTDFTLSINSVESEDIADYYCQQNNNWPTTFGQGTKLELK

SEQ ID NO: 881 - protein, 107 aa, Artificial Sequence
  Reference Variable LC S028A
DILLTQSPVILSVSPGERVSFSCRASQAIGTNIHWYQQRTNGSPRLLIKYASESISGIPSRFSGSGSGTDFTLSINSVESEDIADYYCQQNNNWPTTFGQGTKLELK

SEQ ID NO: 882 - protein, 107 aa, Artificial Sequence
  Reference Variable	LC	S028D
DILLTQSPVILSVSPGERVSFSCRASQDIGTNIHWYQQRTNGSPRLLIKYASESISGIPSRFSGSGSGTDFTLSINSVESEDIADYYCQQNNNWPTTFGQGTKLELK

SEQ ID NO: 883 - protein, 107 aa, Artificial Sequence
  Reference Variable LC S028N
DILLTQSPVILSVSPGERVSFSCRASQNIGTNIHWYQQRTNGSPRLLIKYASESISGIPSRFSGSGSGTDFTLSINSVESEDIADYYCQQNNNWPTTFGQGTKLELK

SEQ ID NO: 884 - protein, 107 aa, Artificial Sequence
  Reference Variable LC S028Q
DILLTQSPVILSVSPGERVSFSCRASQQIGTNIHWYQQRTNGSPRLLIKYASESISGIPSRFSGSGSGTDFTLSINSVESEDIADYYCQQNNNWPTTFGQGTKLELK

SEQ ID NO: 885 - protein, 107 aa, Artificial Sequence
  Reference Variable LC S028L
DILLTQSPVILSVSPGERVSFSCRASQLIGTNIHWYQQRTNGSPRLLIKYASESISGIPSRFSGSGSGTDFTLSINSVESEDIADYYCQQNNNWPTTFGQGTKLELK

SEQ ID NO: 886 - protein, 107 aa, Artificial Sequence
  Reference Variable LC S028K
DILLTQSPVILSVSPGERVSFSCRASQKIGTNIHWYQQRTNGSPRLLIKYASESISGIPSRFSGSGSGTDFTLSINSVESEDIADYYCQQNNNWPTTFGQGTKLELK

SEQ ID NO: 887 - protein, 107 aa, Artificial Sequence
  Reference Variable LC S028H
DILLTQSPVILSVSPGERVSFSCRASQHIGTNIHWYQQRTNGSPRLLIKYASESISGIPSRFSGSGSGTDFTLSINSVESEDIADYYCQQNNNWPTTFGQGTKLELK

SEQ ID NO: 888 - protein, 107 aa, Artificial Sequence
  Reference Variable LC I029A
DILLTQSPVILSVSPGERVSFSCRASQSAGTNIHWYQQRTNGSPRLLIKYASESISGIPSRFSGSGSGTDFTLSINSVESEDIADYYCQQNNNWPTTFGQGTKLELK

SEQ ID NO: 889 - protein, 107 aa, Artificial Sequence
  Reference Variable LC I029E
DILLTQSPVILSVSPGERVSFSCRASQSEGTNIHWYQQRTNGSPRLLIKYASESISGIPSRFSGSGSGTDFTLSINSVESEDIADYYCQQNNNWPTTFGQGTKLELK

SEQ ID NO: 890 - protein, 107 aa, Artificial Sequence
  Reference Variable LC I029F
DILLTQSPVILSVSPGERVSFSCRASQSFGTNIHWYQQRTNGSPRLLIKYASESISGIPSRFSGSGSGTDFTLSINSVESEDIADYYCQQNNNWPTTFGQGTKLELK

SEQ ID NO: 891 - protein, 107 aa, Artificial Sequence
  Reference Variable	LC	I029S
DILLTQSPVILSVSPGERVSFSCRASQSSGTNIHWYQQRTNGSPRLLIKYASESISGIPSRFSGSGSGTDFTLSINSVESEDIADYYCQQNNNWPTTFGQGTKLELK

SEQ ID NO: 892 - protein, 107 aa, Artificial Sequence
  Reference Variable LC I029T
DILLTQSPVILSVSPGERVSFSCRASQSTGTNIHWYQQRTNGSPRLLIKYASESISGIPSRFSGSGSGTDFTLSINSVESEDIADYYCQQNNNWPTTFGQGTKLELK

SEQ ID NO: 893 - protein, 107 aa, Artificial Sequence
  Reference Variable LC I029R
DILLTQSPVILSVSPGERVSFSCRASQSRGTNIHWYQQRTNGSPRLLIKYASESISGIPSRFSGSGSGTDFTLSINSVESEDIADYYCQQNNNWPTTFGQGTKLELK

SEQ ID NO: 894 - protein, 107 aa, Artificial Sequence
  Reference Variable LC G030A
DILLTQSPVILSVSPGERVSFSCRASQSIATNIHWYQQRTNGSPRLLIKYASESISGIPSRFSGSGSGTDFTLSINSVESEDIADYYCQQNNNWPTTFGQGTKLELK

SEQ ID NO: 895 - protein, 107 aa, Artificial Sequence
  Reference Variable LC G030E
DILLTQSPVILSVSPGERVSFSCRASQSIETNIHWYQQRTNGSPRLLIKYASESISGIPSRFSGSGSGTDFTLSINSVESEDIADYYCQQNNNWPTTFGQGTKLELK

SEQ ID NO: 896 - protein, 107 aa, Artificial Sequence
  Reference Variable	LC	G030F
DILLTQSPVILSVSPGERVSFSCRASQSIFTNIHWYQQRTNGSPRLLIKYASESISGIPSRFSGSGSGTDFTLSINSVESEDIADYYCQQNNNWPTTFGQGTKLELK

SEQ ID NO: 897 - protein, 107 aa, Artificial Sequence
  Reference Variable LC G030I
DILLTQSPVILSVSPGERVSFSCRASQSIITNIHWYQQRTNGSPRLLIKYASESISGIPSRFSGSGSGTDFTLSINSVESEDIADYYCQQNNNWPTTFGQGTKLELK

SEQ ID NO: 898 - protein, 107 aa, Artificial Sequence
  Reference Variable LC G030M
DILLTQSPVILSVSPGERVSFSCRASQSIMTNIHWYQQRTNGSPRLLIKYASESISGIPSRFSGSGSGTDFTLSINSVESEDIADYYCQQNNNWPTTFGQGTKLELK

SEQ ID NO: 899 - protein, 107 aa, Artificial Sequence
  Reference Variable	LC	G030P
DILLTQSPVILSVSPGERVSFSCRASQSIPTNIHWYQQRTNGSPRLLIKYASESISGIPSRFSGSGSGTDFTLSINSVESEDIADYYCQQNNNWPTTFGQGTKLELK

SEQ ID NO: 900 - protein, 107 aa, Artificial Sequence
  Reference Variable LC G030Q
DILLTQSPVILSVSPGERVSFSCRASQSIQTNIHWYQQRTNGSPRLLIKYASESISGIPSRFSGSGSGTDFTLSINSVESEDIADYYCQQNNNWPTTFGQGTKLELK

SEQ ID NO: 901 - protein, 107 aa, Artificial Sequence
  Reference Variable	LC	G030S
DILLTQSPVILSVSPGERVSFSCRASQSISTNIHWYQQRTNGSPRLLIKYASESISGIPSRFSGSGSGTDFTLSINSVESEDIADYYCQQNNNWPTTFGQGTKLELK

SEQ ID NO: 902 - protein, 107 aa, Artificial Sequence
  Reference Variable	LC	G030V
DILLTQSPVILSVSPGERVSFSCRASQSIVTNIHWYQQRTNGSPRLLIKYASESISGIPSRFSGSGSGTDFTLSINSVESEDIADYYCQQNNNWPTTFGQGTKLELK

SEQ ID NO: 903 - protein, 107 aa, Artificial Sequence
  Reference Variable	LC	G030Y
DILLTQSPVILSVSPGERVSFSCRASQSIYTNIHWYQQRTNGSPRLLIKYASESISGIPSRFSGSGSGTDFTLSINSVESEDIADYYCQQNNNWPTTFGQGTKLELK

SEQ ID NO: 904 - protein, 107 aa, Artificial Sequence
  Reference Variable	LC	G030L
DILLTQSPVILSVSPGERVSFSCRASQSILTNIHWYQQRTNGSPRLLIKYASESISGIPSRFSGSGSGTDFTLSINSVESEDIADYYCQQNNNWPTTFGQGTKLELK

SEQ ID NO: 905 - protein, 107 aa, Artificial Sequence
  Reference Variable LC G030K
DILLTQSPVILSVSPGERVSFSCRASQSIKTNIHWYQQRTNGSPRLLIKYASESISGIPSRFSGSGSGTDFTLSINSVESEDIADYYCQQNNNWPTTFGQGTKLELK

SEQ ID NO: 906 - protein, 107 aa, Artificial Sequence
  Reference Variable LC G030H
DILLTQSPVILSVSPGERVSFSCRASQSIHTNIHWYQQRTNGSPRLLIKYASESISGIPSRFSGSGSGTDFTLSINSVESEDIADYYCQQNNNWPTTFGQGTKLELK

SEQ ID NO: 907 - protein, 107 aa, Artificial Sequence
  Reference Variable LC G030R
DILLTQSPVILSVSPGERVSFSCRASQSIRTNIHWYQQRTNGSPRLLIKYASESISGIPSRFSGSGSGTDFTLSINSVESEDIADYYCQQNNNWPTTFGQGTKLELK

SEQ ID NO: 908 - protein, 107 aa, Artificial Sequence
  Reference Variable LC T031A
DILLTQSPVILSVSPGERVSFSCRASQSIGANIHWYQQRTNGSPRLLIKYASESISGIPSRFSGSGSGTDFTLSINSVESEDIADYYCQQNNNWPTTFGQGTKLELK

SEQ ID NO: 909 - protein, 107 aa, Artificial Sequence
  Reference Variable	LC	T031F
DILLTQSPVILSVSPGERVSFSCRASQSIGFNIHWYQQRTNGSPRLLIKYASESISGIPSRFSGSGSGTDFTLSINSVESEDIADYYCQQNNNWPTTFGQGTKLELK

SEQ ID NO: 910 - protein, 107 aa, Artificial Sequence
  Reference Variable LC T031G
DILLTQSPVILSVSPGERVSFSCRASQSIGGNIHWYQQRTNGSPRLLIKYASESISGIPSRFSGSGSGTDFTLSINSVESEDIADYYCQQNNNWPTTFGQGTKLELK

SEQ ID NO: 911 - protein, 107 aa, Artificial Sequence
  Reference Variable	LC	T031M
DILLTQSPVILSVSPGERVSFSCRASQSIGMNIHWYQQRTNGSPRLLIKYASESISGIPSRFSGSGSGTDFTLSINSVESEDIADYYCQQNNNWPTTFGQGTKLELK

SEQ ID NO: 912 - protein, 107 aa, Artificial Sequence
  Reference Variable	LC	T031S
DILLTQSPVILSVSPGERVSFSCRASQSIGSNIHWYQQRTNGSPRLLIKYASESISGIPSRFSGSGSGTDFTLSINSVESEDIADYYCQQNNNWPTTFGQGTKLELK

SEQ ID NO: 913 - protein, 107 aa, Artificial Sequence
  Reference Variable	LC	T031V
DILLTQSPVILSVSPGERVSFSCRASQSIGVNIHWYQQRTNGSPRLLIKYASESISGIPSRFSGSGSGTDFTLSINSVESEDIADYYCQQNNNWPTTFGQGTKLELK

SEQ ID NO: 914 - protein, 107 aa, Artificial Sequence
  Reference Variable LC T031W
DILLTQSPVILSVSPGERVSFSCRASQSIGWNIHWYQQRTNGSPRLLIKYASESISGIPSRFSGSGSGTDFTLSINSVESEDIADYYCQQNNNWPTTFGQGTKLELK

SEQ ID NO: 915 - protein, 107 aa, Artificial Sequence
  Reference Variable	LC	T031L
DILLTQSPVILSVSPGERVSFSCRASQSIGLNIHWYQQRTNGSPRLLIKYASESISGIPSRFSGSGSGTDFTLSINSVESEDIADYYCQQNNNWPTTFGQGTKLELK

SEQ ID NO: 916 - protein, 107 aa, Artificial Sequence
  Reference Variable LC T031K
DILLTQSPVILSVSPGERVSFSCRASQSIGKNIHWYQQRTNGSPRLLIKYASESISGIPSRFSGSGSGTDFTLSINSVESEDIADYYCQQNNNWPTTFGQGTKLELK

SEQ ID NO: 917 - protein, 107 aa, Artificial Sequence
  Reference Variable LC T031H
DILLTQSPVILSVSPGERVSFSCRASQSIGHNIHWYQQRTNGSPRLLIKYASESISGIPSRFSGSGSGTDFTLSINSVESEDIADYYCQQNNNWPTTFGQGTKLELK

SEQ ID NO: 918 - protein, 107 aa, Artificial Sequence
  Reference Variable LC N032G
DILLTQSPVILSVSPGERVSFSCRASQSIGTGIHWYQQRTNGSPRLLIKYASESISGIPSRFSGSGSGTDFTLSINSVESEDIADYYCQQNNNWPTTFGQGTKLELK

SEQ ID NO: 919 - protein, 107 aa, Artificial Sequence
  Reference Variable LC I033F
DILLTQSPVILSVSPGERVSFSCRASQSIGTNFHWYQQRTNGSPRLLIKYASESISGIPSRFSGSGSGTDFTLSINSVESEDIADYYCQQNNNWPTTFGQGTKLELK

SEQ ID NO: 920 - protein, 107 aa, Artificial Sequence
  Reference Variable	LC	I033G
DILLTQSPVILSVSPGERVSFSCRASQSIGTNGHWYQQRTNGSPRLLIKYASESISGIPSRFSGSGSGTDFTLSINSVESEDIADYYCQQNNNWPTTFGQGTKLELK

SEQ ID NO: 921 - protein, 107 aa, Artificial Sequence
  Reference Variable LC I033M
DILLTQSPVILSVSPGERVSFSCRASQSIGTNMHWYQQRTNGSPRLLIKYASESISGIPSRFSGSGSGTDFTLSINSVESEDIADYYCQQNNNWPTTFGQGTKLELK

SEQ ID NO: 922 - protein, 107 aa, Artificial Sequence
  Reference Variable LC I033T
DILLTQSPVILSVSPGERVSFSCRASQSIGTNTHWYQQRTNGSPRLLIKYASESISGIPSRFSGSGSGTDFTLSINSVESEDIADYYCQQNNNWPTTFGQGTKLELK

SEQ ID NO: 923 - protein, 107 aa, Artificial Sequence
  Reference Variable	LC	I033V
DILLTQSPVILSVSPGERVSFSCRASQSIGTNVHWYQQRTNGSPRLLIKYASESISGIPSRFSGSGSGTDFTLSINSVESEDIADYYCQQNNNWPTTFGQGTKLELK

SEQ ID NO: 924 - protein, 107 aa, Artificial Sequence
  Reference Variable LC I033H
DILLTQSPVILSVSPGERVSFSCRASQSIGTNHHWYQQRTNGSPRLLIKYASESISGIPSRFSGSGSGTDFTLSINSVESEDIADYYCQQNNNWPTTFGQGTKLELK

SEQ ID NO: 925 - protein, 107 aa, Artificial Sequence
  Reference Variable	LC	I048M
DILLTQSPVILSVSPGERVSFSCRASQSIGTNIHWYQQRTNGSPRLLMKYASESISGIPSRFSGSGSGTDFTLSINSVESEDIADYYCQQNNNWPTTFGQGTKLELK

SEQ ID NO: 926 - protein, 107 aa, Artificial Sequence
  Reference Variable	LC	I048S
DILLTQSPVILSVSPGERVSFSCRASQSIGTNIHWYQQRTNGSPRLLSKYASESISGIPSRFSGSGSGTDFTLSINSVESEDIADYYCQQNNNWPTTFGQGTKLELK

SEQ ID NO: 927 - protein, 107 aa, Artificial Sequence
  Reference Variable LC I048L
DILLTQSPVILSVSPGERVSFSCRASQSIGTNIHWYQQRTNGSPRLLLKYASESISGIPSRFSGSGSGTDFTLSINSVESEDIADYYCQQNNNWPTTFGQGTKLELK

SEQ ID NO: 928 - protein, 107 aa, Artificial Sequence
  Reference Variable	LC	I048K
DILLTQSPVILSVSPGERVSFSCRASQSIGTNIHWYQQRTNGSPRLLKKYASESISGIPSRFSGSGSGTDFTLSINSVESEDIADYYCQQNNNWPTTFGQGTKLELK

SEQ ID NO: 929 - protein, 107 aa, Artificial Sequence
  Reference Variable	LC	K049A
DILLTQSPVILSVSPGERVSFSCRASQSIGTNIHWYQQRTNGSPRLLIAYASESISGIPSRFSGSGSGTDFTLSINSVESEDIADYYCQQNNNWPTTFGQGTKLELK

SEQ ID NO: 930 - protein, 107 aa, Artificial Sequence
  Reference Variable	LC	K049E
DILLTQSPVILSVSPGERVSFSCRASQSIGTNIHWYQQRTNGSPRLLIEYASESISGIPSRFSGSGSGTDFTLSINSVESEDIADYYCQQNNNWPTTFGQGTKLELK

SEQ ID NO: 931 - protein, 107 aa, Artificial Sequence
  Reference Variable	LC	K049F
DILLTQSPVILSVSPGERVSFSCRASQSIGTNIHWYQQRTNGSPRLLIFYASESISGIPSRFSGSGSGTDFTLSINSVESEDIADYYCQQNNNWPTTFGQGTKLELK

SEQ ID NO: 932 - protein, 107 aa, Artificial Sequence
  Reference Variable	LC	K049G
DILLTQSPVILSVSPGERVSFSCRASQSIGTNIHWYQQRTNGSPRLLIGYASESISGIPSRFSGSGSGTDFTLSINSVESEDIADYYCQQNNNWPTTFGQGTKLELK

SEQ ID NO: 933 - protein, 107 aa, Artificial Sequence
  Reference Variable	LC	K049N
DILLTQSPVILSVSPGERVSFSCRASQSIGTNIHWYQQRTNGSPRLLINYASESISGIPSRFSGSGSGTDFTLSINSVESEDIADYYCQQNNNWPTTFGQGTKLELK

SEQ ID NO: 934 - protein, 107 aa, Artificial Sequence
  Reference Variable LC K049Q
DILLTQSPVILSVSPGERVSFSCRASQSIGTNIHWYQQRTNGSPRLLIQYASESISGIPSRFSGSGSGTDFTLSINSVESEDIADYYCQQNNNWPTTFGQGTKLELK

SEQ ID NO: 935 - protein, 107 aa, Artificial Sequence
  Reference Variable LC K049S
DILLTQSPVILSVSPGERVSFSCRASQSIGTNIHWYQQRTNGSPRLLISYASESISGIPSRFSGSGSGTDFTLSINSVESEDIADYYCQQNNNWPTTFGQGTKLELK

SEQ ID NO: 936 - protein, 107 aa, Artificial Sequence
  Reference Variable LC K049T
DILLTQSPVILSVSPGERVSFSCRASQSIGTNIHWYQQRTNGSPRLLITYASESISGIPSRFSGSGSGTDFTLSINSVESEDIADYYCQQNNNWPTTFGQGTKLELK

SEQ ID NO: 937 - protein, 107 aa, Artificial Sequence
  Reference Variable LC K049V
DILLTQSPVILSVSPGERVSFSCRASQSIGTNIHWYQQRTNGSPRLLIVYASESISGIPSRFSGSGSGTDFTLSINSVESEDIADYYCQQNNNWPTTFGQGTKLELK

SEQ ID NO: 938 - protein, 107 aa, Artificial Sequence
  Reference Variable LC K049Y
DILLTQSPVILSVSPGERVSFSCRASQSIGTNIHWYQQRTNGSPRLLIYYASESISGIPSRFSGSGSGTDFTLSINSVESEDIADYYCQQNNNWPTTFGQGTKLELK

SEQ ID NO: 939 - protein, 107 aa, Artificial Sequence
  Reference Variable LC K049L
DILLTQSPVILSVSPGERVSFSCRASQSIGTNIHWYQQRTNGSPRLLILYASESISGIPSRFSGSGSGTDFTLSINSVESEDIADYYCQQNNNWPTTFGQGTKLELK

SEQ ID NO: 940 - protein, 107 aa, Artificial Sequence
  Reference Variable LC K049H
DILLTQSPVILSVSPGERVSFSCRASQSIGTNIHWYQQRTNGSPRLLIHYASESISGIPSRFSGSGSGTDFTLSINSVESEDIADYYCQQNNNWPTTFGQGTKLELK

SEQ ID NO: 941 - protein, 107 aa, Artificial Sequence
  Reference Variable LC K049R
DILLTQSPVILSVSPGERVSFSCRASQSIGTNIHWYQQRTNGSPRLLIRYASESISGIPSRFSGSGSGTDFTLSINSVESEDIADYYCQQNNNWPTTFGQGTKLELK

SEQ ID NO: 942 - protein, 107 aa, Artificial Sequence
  Reference Variable LC A051T
DILLTQSPVILSVSPGERVSFSCRASQSIGTNIHWYQQRTNGSPRLLIKYTSESISGIPSRFSGSGSGTDFTLSINSVESEDIADYYCQQNNNWPTTFGQGTKLELK

SEQ ID NO: 943 - protein, 107 aa, Artificial Sequence
  Reference Variable LC A051L
DILLTQSPVILSVSPGERVSFSCRASQSIGTNIHWYQQRTNGSPRLLIKYLSESISGIPSRFSGSGSGTDFTLSINSVESEDIADYYCQQNNNWPTTFGQGTKLELK

SEQ ID NO: 944 - protein, 107 aa, Artificial Sequence
  Reference Variable LC S052A
DILLTQSPVILSVSPGERVSFSCRASQSIGTNIHWYQQRTNGSPRLLIKYAAESISGIPSRFSGSGSGTDFTLSINSVESEDIADYYCQQNNNWPTTFGQGTKLELK

SEQ ID NO: 945 - protein, 107 aa, Artificial Sequence
  Reference Variable LC S052C
DILLTQSPVILSVSPGERVSFSCRASQSIGTNIHWYQQRTNGSPRLLIKYACESISGIPSRFSGSGSGTDFTLSINSVESEDIADYYCQQNNNWPTTFGQGTKLELK

SEQ ID NO: 946 - protein, 107 aa, Artificial Sequence
  Reference Variable LC S052D
DILLTQSPVILSVSPGERVSFSCRASQSIGTNIHWYQQRTNGSPRLLIKYADESISGIPSRFSGSGSGTDFTLSINSVESEDIADYYCQQNNNWPTTFGQGTKLELK

SEQ ID NO: 947 - protein, 107 aa, Artificial Sequence
  Reference Variable LC S052E
DILLTQSPVILSVSPGERVSFSCRASQSIGTNIHWYQQRTNGSPRLLIKYAEESISGIPSRFSGSGSGTDFTLSINSVESEDIADYYCQQNNNWPTTFGQGTKLELK

SEQ ID NO: 948 - protein, 107 aa, Artificial Sequence
  Reference Variable LC S052G
DILLTQSPVILSVSPGERVSFSCRASQSIGTNIHWYQQRTNGSPRLLIKYAGESISGIPSRFSGSGSGTDFTLSINSVESEDIADYYCQQNNNWPTTFGQGTKLELK

SEQ ID NO: 949 - protein, 107 aa, Artificial Sequence
  Reference Variable LC S052I
DILLTQSPVILSVSPGERVSFSCRASQSIGTNIHWYQQRTNGSPRLLIKYAIESISGIPSRFSGSGSGTDFTLSINSVESEDIADYYCQQNNNWPTTFGQGTKLELK

SEQ ID NO: 950 - protein, 107 aa, Artificial Sequence
  Reference Variable LC S052M
DILLTQSPVILSVSPGERVSFSCRASQSIGTNIHWYQQRTNGSPRLLIKYAMESISGIPSRFSGSGSGTDFTLSINSVESEDIADYYCQQNNNWPTTFGQGTKLELK

SEQ ID NO: 951 - protein, 107 aa, Artificial Sequence
  Reference Variable LC S052Q
DILLTQSPVILSVSPGERVSFSCRASQSIGTNIHWYQQRTNGSPRLLIKYAQESISGIPSRFSGSGSGTDFTLSINSVESEDIADYYCQQNNNWPTTFGQGTKLELK

SEQ ID NO: 952 - protein, 107 aa, Artificial Sequence
  Reference Variable LC S052V
DILLTQSPVILSVSPGERVSFSCRASQSIGTNIHWYQQRTNGSPRLLIKYAVESISGIPSRFSGSGSGTDFTLSINSVESEDIADYYCQQNNNWPTTFGQGTKLELK

SEQ ID NO: 953 - protein, 107 aa, Artificial Sequence
  Reference Variable LC S052W
DILLTQSPVILSVSPGERVSFSCRASQSIGTNIHWYQQRTNGSPRLLIKYAWESISGIPSRFSGSGSGTDFTLSINSVESEDIADYYCQQNNNWPTTFGQGTKLELK

SEQ ID NO: 954 - protein, 107 aa, Artificial Sequence
  Reference Variable LC S052R
DILLTQSPVILSVSPGERVSFSCRASQSIGTNIHWYQQRTNGSPRLLIKYARESISGIPSRFSGSGSGTDFTLSINSVESEDIADYYCQQNNNWPTTFGQGTKLELK

SEQ ID NO: 955 - protein, 107 aa, Artificial Sequence
  Reference Variable LC S052K
DILLTQSPVILSVSPGERVSFSCRASQSIGTNIHWYQQRTNGSPRLLIKYAKESISGIPSRFSGSGSGTDFTLSINSVESEDIADYYCQQNNNWPTTFGQGTKLELK

SEQ ID NO: 956 - protein, 107 aa, Artificial Sequence
  Reference Variable LC E053G
DILLTQSPVILSVSPGERVSFSCRASQSIGTNIHWYQQRTNGSPRLLIKYASGSISGIPSRFSGSGSGTDFTLSINSVESEDIADYYCQQNNNWPTTFGQGTKLELK

SEQ ID NO: 957 - protein, 107 aa, Artificial Sequence
  Reference Variable LC S054M
DILLTQSPVILSVSPGERVSFSCRASQSIGTNIHWYQQRTNGSPRLLIKYASEMISGIPSRFSGSGSGTDFTLSINSVESEDIADYYCQQNNNWPTTFGQGTKLELK

SEQ ID NO: 958 - protein, 107 aa, Artificial Sequence
  Reference Variable LC I055A
DILLTQSPVILSVSPGERVSFSCRASQSIGTNIHWYQQRTNGSPRLLIKYASESASGIPSRFSGSGSGTDFTLSINSVESEDIADYYCQQNNNWPTTFGQGTKLELK

SEQ ID NO: 959 - protein, 107 aa, Artificial Sequence
  Reference Variable LC I055F
DILLTQSPVILSVSPGERVSFSCRASQSIGTNIHWYQQRTNGSPRLLIKYASESFSGIPSRFSGSGSGTDFTLSINSVESEDIADYYCQQNNNWPTTFGQGTKLELK

SEQ ID NO: 960 - protein, 107 aa, Artificial Sequence
  Reference Variable LC S056G
DILLTQSPVILSVSPGERVSFSCRASQSIGTNIHWYQQRTNGSPRLLIKYASESIGGIPSRFSGSGSGTDFTLSINSVESEDIADYYCQQNNNWPTTFGQGTKLELK

SEQ ID NO: 961 - protein, 107 aa, Artificial Sequence
  Reference Variable LC S056L
DILLTQSPVILSVSPGERVSFSCRASQSIGTNIHWYQQRTNGSPRLLIKYASESILGIPSRFSGSGSGTDFTLSINSVESEDIADYYCQQNNNWPTTFGQGTKLELK

SEQ ID NO: 962 - protein, 107 aa, Artificial Sequence
  Reference Variable LC S056A
DILLTQSPVILSVSPGERVSFSCRASQSIGTNIHWYQQRTNGSPRLLIKYASESIAGIPSRFSGSGSGTDFTLSINSVESEDIADYYCQQNNNWPTTFGQGTKLELK

SEQ ID NO: 963 - protein, 107 aa, Artificial Sequence
  Reference Variable LC S056C
DILLTQSPVILSVSPGERVSFSCRASQSIGTNIHWYQQRTNGSPRLLIKYASESICGIPSRFSGSGSGTDFTLSINSVESEDIADYYCQQNNNWPTTFGQGTKLELK

SEQ ID NO: 964 - protein, 107 aa, Artificial Sequence
  Reference Variable LC S056D
DILLTQSPVILSVSPGERVSFSCRASQSIGTNIHWYQQRTNGSPRLLIKYASESIDGIPSRFSGSGSGTDFTLSINSVESEDIADYYCQQNNNWPTTFGQGTKLELK

SEQ ID NO: 965 - protein, 107 aa, Artificial Sequence
  Reference Variable LC S056E
DILLTQSPVILSVSPGERVSFSCRASQSIGTNIHWYQQRTNGSPRLLIKYASESIEGIPSRFSGSGSGTDFTLSINSVESEDIADYYCQQNNNWPTTFGQGTKLELK

SEQ ID NO: 966 - protein, 107 aa, Artificial Sequence
  Reference Variable LC S056F
DILLTQSPVILSVSPGERVSFSCRASQSIGTNIHWYQQRTNGSPRLLIKYASESIFGIPSRFSGSGSGTDFTLSINSVESEDIADYYCQQNNNWPTTFGQGTKLELK

SEQ ID NO: 967 - protein, 107 aa, Artificial Sequence
  Reference Variable LC S056N
DILLTQSPVILSVSPGERVSFSCRASQSIGTNIHWYQQRTNGSPRLLIKYASESINGIPSRFSGSGSGTDFTLSINSVESEDIADYYCQQNNNWPTTFGQGTKLELK

SEQ ID NO: 968 - protein, 107 aa, Artificial Sequence
  Reference Variable LC S056P
DILLTQSPVILSVSPGERVSFSCRASQSIGTNIHWYQQRTNGSPRLLIKYASESIPGIPSRFSGSGSGTDFTLSINSVESEDIADYYCQQNNNWPTTFGQGTKLELK

SEQ ID NO: 969 - protein, 107 aa, Artificial Sequence
  Reference Variable LC S056Q
DILLTQSPVILSVSPGERVSFSCRASQSIGTNIHWYQQRTNGSPRLLIKYASESIQGIPSRFSGSGSGTDFTLSINSVESEDIADYYCQQNNNWPTTFGQGTKLELK

SEQ ID NO: 970 - protein, 107 aa, Artificial Sequence
  Reference Variable LC S056V
DILLTQSPVILSVSPGERVSFSCRASQSIGTNIHWYQQRTNGSPRLLIKYASESIVGIPSRFSGSGSGTDFTLSINSVESEDIADYYCQQNNNWPTTFGQGTKLELK

SEQ ID NO: 971 - protein, 107 aa, Artificial Sequence
  Reference Variable LC S056W
DILLTQSPVILSVSPGERVSFSCRASQSIGTNIHWYQQRTNGSPRLLIKYASESIWGIPSRFSGSGSGTDFTLSINSVESEDIADYYCQQNNNWPTTFGQGTKLELK

SEQ ID NO: 972 - protein, 107 aa, Artificial Sequence
  Reference Variable LC S056H
DILLTQSPVILSVSPGERVSFSCRASQSIGTNIHWYQQRTNGSPRLLIKYASESIHGIPSRFSGSGSGTDFTLSINSVESEDIADYYCQQNNNWPTTFGQGTKLELK

SEQ ID NO: 973 - protein, 107 aa, Artificial Sequence
  Reference Variable LC S056R
DILLTQSPVILSVSPGERVSFSCRASQSIGTNIHWYQQRTNGSPRLLIKYASESIRGIPSRFSGSGSGTDFTLSINSVESEDIADYYCQQNNNWPTTFGQGTKLELK

SEQ ID NO: 974 - protein, 107 aa, Artificial Sequence
  Reference Variable LC S056K
DILLTQSPVILSVSPGERVSFSCRASQSIGTNIHWYQQRTNGSPRLLIKYASESIKGIPSRFSGSGSGTDFTLSINSVESEDIADYYCQQNNNWPTTFGQGTKLELK

SEQ ID NO: 975 - protein, 107 aa, Artificial Sequence
  Reference Variable LC Y086F
DILLTQSPVILSVSPGERVSFSCRASQSIGTNIHWYQQRTNGSPRLLIKYASESISGIPSRFSGSGSGTDFTLSINSVESEDIADFYCQQNNNWPTTFGQGTKLELK

SEQ ID NO: 976 - protein, 107 aa, Artificial Sequence
  Reference Variable LC Y086M
DILLTQSPVILSVSPGERVSFSCRASQSIGTNIHWYQQRTNGSPRLLIKYASESISGIPSRFSGSGSGTDFTLSINSVESEDIADMYCQQNNNWPTTFGQGTKLELK

SEQ ID NO: 977 - protein, 107 aa, Artificial Sequence
  Reference Variable LC Y086H
DILLTQSPVILSVSPGERVSFSCRASQSIGTNIHWYQQRTNGSPRLLIKYASESISGIPSRFSGSGSGTDFTLSINSVESEDIADHYCQQNNNWPTTFGQGTKLELK

SEQ ID NO: 978 - protein, 107 aa, Artificial Sequence
  Reference Variable LC Y087L
DILLTQSPVILSVSPGERVSFSCRASQSIGTNIHWYQQRTNGSPRLLIKYASESISGIPSRFSGSGSGTDFTLSINSVESEDIADYLCQQNNNWPTTFGQGTKLELK

SEQ ID NO: 979 - protein, 107 aa, Artificial Sequence
  Reference Variable LC Y087C
DILLTQSPVILSVSPGERVSFSCRASQSIGTNIHWYQQRTNGSPRLLIKYASESISGIPSRFSGSGSGTDFTLSINSVESEDIADYCCQQNNNWPTTFGQGTKLELK

SEQ ID NO: 980 - protein, 107 aa, Artificial Sequence
  Reference Variable LC Y087D
DILLTQSPVILSVSPGERVSFSCRASQSIGTNIHWYQQRTNGSPRLLIKYASESISGIPSRFSGSGSGTDFTLSINSVESEDIADYDCQQNNNWPTTFGQGTKLELK

SEQ ID NO: 981 - protein, 107 aa, Artificial Sequence
  Reference Variable LC Y087F
DILLTQSPVILSVSPGERVSFSCRASQSIGTNIHWYQQRTNGSPRLLIKYASESISGIPSRFSGSGSGTDFTLSINSVESEDIADYFCQQNNNWPTTFGQGTKLELK

SEQ ID NO: 982 - protein, 107 aa, Artificial Sequence
  Reference Variable LC Y087G
DILLTQSPVILSVSPGERVSFSCRASQSIGTNIHWYQQRTNGSPRLLIKYASESISGIPSRFSGSGSGTDFTLSINSVESEDIADYGCQQNNNWPTTFGQGTKLELK

SEQ ID NO: 983 - protein, 107 aa, Artificial Sequence
  Reference Variable LC Y087I
DILLTQSPVILSVSPGERVSFSCRASQSIGTNIHWYQQRTNGSPRLLIKYASESISGIPSRFSGSGSGTDFTLSINSVESEDIADYICQQNNNWPTTFGQGTKLELK

SEQ ID NO: 984 - protein, 107 aa, Artificial Sequence
  Reference Variable LC Y087N
DILLTQSPVILSVSPGERVSFSCRASQSIGTNIHWYQQRTNGSPRLLIKYASESISGIPSRFSGSGSGTDFTLSINSVESEDIADYNCQQNNNWPTTFGQGTKLELK

SEQ ID NO: 985 - protein, 107 aa, Artificial Sequence
  Reference Variable LC Y087P
DILLTQSPVILSVSPGERVSFSCRASQSIGTNIHWYQQRTNGSPRLLIKYASESISGIPSRFSGSGSGTDFTLSINSVESEDIADYPCQQNNNWPTTFGQGTKLELK

SEQ ID NO: 986 - protein, 107 aa, Artificial Sequence
  Reference Variable LC Y087S
DILLTQSPVILSVSPGERVSFSCRASQSIGTNIHWYQQRTNGSPRLLIKYASESISGIPSRFSGSGSGTDFTLSINSVESEDIADYSCQQNNNWPTTFGQGTKLELK

SEQ ID NO: 987 - protein, 107 aa, Artificial Sequence
  Reference Variable LC Y087T
DILLTQSPVILSVSPGERVSFSCRASQSIGTNIHWYQQRTNGSPRLLIKYASESISGIPSRFSGSGSGTDFTLSINSVESEDIADYTCQQNNNWPTTFGQGTKLELK

SEQ ID NO: 988 - protein, 107 aa, Artificial Sequence
  Reference Variable LC Y087V
DILLTQSPVILSVSPGERVSFSCRASQSIGTNIHWYQQRTNGSPRLLIKYASESISGIPSRFSGSGSGTDFTLSINSVESEDIADYVCQQNNNWPTTFGQGTKLELK

SEQ ID NO: 989 - protein, 107 aa, Artificial Sequence
  Reference Variable LC Y087W
DILLTQSPVILSVSPGERVSFSCRASQSIGTNIHWYQQRTNGSPRLLIKYASESISGIPSRFSGSGSGTDFTLSINSVESEDIADYWCQQNNNWPTTFGQGTKLELK

SEQ ID NO: 990 - protein, 107 aa, Artificial Sequence
  Reference Variable LC Y087K
DILLTQSPVILSVSPGERVSFSCRASQSIGTNIHWYQQRTNGSPRLLIKYASESISGIPSRFSGSGSGTDFTLSINSVESEDIADYKCQQNNNWPTTFGQGTKLELK

SEQ ID NO: 991 - protein, 107 aa, Artificial Sequence
  Reference Variable LC Y087H
DILLTQSPVILSVSPGERVSFSCRASQSIGTNIHWYQQRTNGSPRLLIKYASESISGIPSRFSGSGSGTDFTLSINSVESEDIADYHCQQNNNWPTTFGQGTKLELK

SEQ ID NO: 992 - protein, 107 aa, Artificial Sequence
  Reference Variable LC Y087R
DILLTQSPVILSVSPGERVSFSCRASQSIGTNIHWYQQRTNGSPRLLIKYASESISGIPSRFSGSGSGTDFTLSINSVESEDIADYRCQQNNNWPTTFGQGTKLELK

SEQ ID NO: 993 - protein, 107 aa, Artificial Sequence
  Reference Variable LC Q089E
DILLTQSPVILSVSPGERVSFSCRASQSIGTNIHWYQQRTNGSPRLLIKYASESISGIPSRFSGSGSGTDFTLSINSVESEDIADYYCEQNNNWPTTFGQGTKLELK

SEQ ID NO: 994 - protein, 107 aa, Artificial Sequence
  Reference Variable LC N091L
DILLTQSPVILSVSPGERVSFSCRASQSIGTNIHWYQQRTNGSPRLLIKYASESISGIPSRFSGSGSGTDFTLSINSVESEDIADYYCQQLNNWPTTFGQGTKLELK

SEQ ID NO: 995 - protein, 107 aa, Artificial Sequence
  Reference Variable LC N091A
DILLTQSPVILSVSPGERVSFSCRASQSIGTNIHWYQQRTNGSPRLLIKYASESISGIPSRFSGSGSGTDFTLSINSVESEDIADYYCQQANNWPTTFGQGTKLELK

SEQ ID NO: 996 - protein, 107 aa, Artificial Sequence
  Reference Variable LC N091C
DILLTQSPVILSVSPGERVSFSCRASQSIGTNIHWYQQRTNGSPRLLIKYASESISGIPSRFSGSGSGTDFTLSINSVESEDIADYYCQQCNNWPTTFGQGTKLELK

SEQ ID NO: 997 - protein, 107 aa, Artificial Sequence
  Reference Variable LC N091I
DILLTQSPVILSVSPGERVSFSCRASQSIGTNIHWYQQRTNGSPRLLIKYASESISGIPSRFSGSGSGTDFTLSINSVESEDIADYYCQQINNWPTTFGQGTKLELK

SEQ ID NO: 998 - protein, 107 aa, Artificial Sequence
  Reference Variable LC N091M
DILLTQSPVILSVSPGERVSFSCRASQSIGTNIHWYQQRTNGSPRLLIKYASESISGIPSRFSGSGSGTDFTLSINSVESEDIADYYCQQMNNWPTTFGQGTKLELK

SEQ ID NO: 999 - protein, 107 aa, Artificial Sequence
  Reference Variable LC N091S
DILLTQSPVILSVSPGERVSFSCRASQSIGTNIHWYQQRTNGSPRLLIKYASESISGIPSRFSGSGSGTDFTLSINSVESEDIADYYCQQSNNWPTTFGQGTKLELK

SEQ ID NO: 1000 - protein, 107 aa, Artificial Sequence
  Reference Variable LC N091T
DILLTQSPVILSVSPGERVSFSCRASQSIGTNIHWYQQRTNGSPRLLIKYASESISGIPSRFSGSGSGTDFTLSINSVESEDIADYYCQQTNNWPTTFGQGTKLELK

SEQ ID NO: 1001 - protein, 107 aa, Artificial Sequence
  Reference Variable LC N091V
DILLTQSPVILSVSPGERVSFSCRASQSIGTNIHWYQQRTNGSPRLLIKYASESISGIPSRFSGSGSGTDFTLSINSVESEDIADYYCQQVNNWPTTFGQGTKLELK

SEQ ID NO: 1002 - protein, 107 aa, Artificial Sequence
  Reference Variable LC N091H
DILLTQSPVILSVSPGERVSFSCRASQSIGTNIHWYQQRTNGSPRLLIKYASESISGIPSRFSGSGSGTDFTLSINSVESEDIADYYCQQHNNWPTTFGQGTKLELK

SEQ ID NO: 1003 - protein, 107 aa, Artificial Sequence
  Reference Variable LC N091R
DILLTQSPVILSVSPGERVSFSCRASQSIGTNIHWYQQRTNGSPRLLIKYASESISGIPSRFSGSGSGTDFTLSINSVESEDIADYYCQQRNNWPTTFGQGTKLELK

SEQ ID NO: 1004 - protein, 107 aa, Artificial Sequence
  Reference Variable LC N092C
DILLTQSPVILSVSPGERVSFSCRASQSIGTNIHWYQQRTNGSPRLLIKYASESISGIPSRFSGSGSGTDFTLSINSVESEDIADYYCQQNCNWPTTFGQGTKLELK

SEQ ID NO: 1005 - protein, 107 aa, Artificial Sequence
  Reference Variable	LC	N092D
DILLTQSPVILSVSPGERVSFSCRASQSIGTNIHWYQQRTNGSPRLLIKYASESISGIPSRFSGSGSGTDFTLSINSVESEDIADYYCQQNDNWPTTFGQGTKLELK

SEQ ID NO: 1006 - protein, 107 aa, Artificial Sequence
  Reference Variable LC N092L
DILLTQSPVILSVSPGERVSFSCRASQSIGTNIHWYQQRTNGSPRLLIKYASESISGIPSRFSGSGSGTDFTLSINSVESEDIADYYCQQNLNWPTTFGQGTKLELK

SEQ ID NO: 1007 - protein, 107 aa, Artificial Sequence
  Reference Variable LC N092M
DILLTQSPVILSVSPGERVSFSCRASQSIGTNIHWYQQRTNGSPRLLIKYASESISGIPSRFSGSGSGTDFTLSINSVESEDIADYYCQQNMNWPTTFGQGTKLELK

SEQ ID NO: 1008 - protein, 107 aa, Artificial Sequence
  Reference Variable LC N092S
DILLTQSPVILSVSPGERVSFSCRASQSIGTNIHWYQQRTNGSPRLLIKYASESISGIPSRFSGSGSGTDFTLSINSVESEDIADYYCQQNSNWPTTFGQGTKLELK

SEQ ID NO: 1009 - protein, 107 aa, Artificial Sequence
  Reference Variable LC N092T
DILLTQSPVILSVSPGERVSFSCRASQSIGTNIHWYQQRTNGSPRLLIKYASESISGIPSRFSGSGSGTDFTLSINSVESEDIADYYCQQNTNWPTTFGQGTKLELK

SEQ ID NO: 1010 - protein, 107 aa, Artificial Sequence
  Reference Variable LC N092V
DILLTQSPVILSVSPGERVSFSCRASQSIGTNIHWYQQRTNGSPRLLIKYASESISGIPSRFSGSGSGTDFTLSINSVESEDIADYYCQQNVNWPTTFGQGTKLELK

SEQ ID NO: 1011 - protein, 107 aa, Artificial Sequence
  Reference Variable LC N092W
DILLTQSPVILSVSPGERVSFSCRASQSIGTNIHWYQQRTNGSPRLLIKYASESISGIPSRFSGSGSGTDFTLSINSVESEDIADYYCQQNWNWPTTFGQGTKLELK

SEQ ID NO: 1012 - protein, 107 aa, Artificial Sequence
  Reference Variable LC N092Y
DILLTQSPVILSVSPGERVSFSCRASQSIGTNIHWYQQRTNGSPRLLIKYASESISGIPSRFSGSGSGTDFTLSINSVESEDIADYYCQQNYNWPTTFGQGTKLELK

SEQ ID NO: 1013 - protein, 107 aa, Artificial Sequence
  Reference Variable LC N092H
DILLTQSPVILSVSPGERVSFSCRASQSIGTNIHWYQQRTNGSPRLLIKYASESISGIPSRFSGSGSGTDFTLSINSVESEDIADYYCQQNHNWPTTFGQGTKLELK

SEQ ID NO: 1014 - protein, 107 aa, Artificial Sequence
  Reference Variable LC N092K
DILLTQSPVILSVSPGERVSFSCRASQSIGTNIHWYQQRTNGSPRLLIKYASESISGIPSRFSGSGSGTDFTLSINSVESEDIADYYCQQNKNWPTTFGQGTKLELK

SEQ ID NO: 1015 - protein, 107 aa, Artificial Sequence
  Reference Variable LC N092R
DILLTQSPVILSVSPGERVSFSCRASQSIGTNIHWYQQRTNGSPRLLIKYASESISGIPSRFSGSGSGTDFTLSINSVESEDIADYYCQQNRNWPTTFGQGTKLELK

SEQ ID NO: 1016 - protein, 107 aa, Artificial Sequence
  Reference Variable LC N093T
DILLTQSPVILSVSPGERVSFSCRASQSIGTNIHWYQQRTNGSPRLLIKYASESISGIPSRFSGSGSGTDFTLSINSVESEDIADYYCQQNNTWPTTFGQGTKLELK

SEQ ID NO: 1017 - protein, 107 aa, Artificial Sequence
  Reference Variable LC T096L
DILLTQSPVILSVSPGERVSFSCRASQSIGTNIHWYQQRTNGSPRLLIKYASESISGIPSRFSGSGSGTDFTLSINSVESEDIADYYCQQNNNWPLTFGQGTKLELK

SEQ ID NO: 1018 - protein, 107 aa, Artificial Sequence
  Reference Variable LC T096C
DILLTQSPVILSVSPGERVSFSCRASQSIGTNIHWYQQRTNGSPRLLIKYASESISGIPSRFSGSGSGTDFTLSINSVESEDIADYYCQQNNNWPCTFGQGTKLELK

SEQ ID NO: 1019 - protein, 107 aa, Artificial Sequence
  Reference Variable LC T096M
DILLTQSPVILSVSPGERVSFSCRASQSIGTNIHWYQQRTNGSPRLLIKYASESISGIPSRFSGSGSGTDFTLSINSVESEDIADYYCQQNNNWPMTFGQGTKLELK

SEQ ID NO: 1020 - protein, 107 aa, Artificial Sequence
  Reference Variable LC T096V
DILLTQSPVILSVSPGERVSFSCRASQSIGTNIHWYQQRTNGSPRLLIKYASESISGIPSRFSGSGSGTDFTLSINSVESEDIADYYCQQNNNWPVTFGQGTKLELK

SEQ ID NO: 1021 - protein, 107 aa, Artificial Sequence
  Reference Variable LC T097L
DILLTQSPVILSVSPGERVSFSCRASQSIGTNIHWYQQRTNGSPRLLIKYASESISGIPSRFSGSGSGTDFTLSINSVESEDIADYYCQQNNNWPTLFGQGTKLELK

SEQ ID NO: 1022 - protein, 107 aa, Artificial Sequence
  Reference Variable LC T097A
DILLTQSPVILSVSPGERVSFSCRASQSIGTNIHWYQQRTNGSPRLLIKYASESISGIPSRFSGSGSGTDFTLSINSVESEDIADYYCQQNNNWPTAFGQGTKLELK

SEQ ID NO: 1023 - protein, 107 aa, Artificial Sequence
  Reference Variable LC T097D
DILLTQSPVILSVSPGERVSFSCRASQSIGTNIHWYQQRTNGSPRLLIKYASESISGIPSRFSGSGSGTDFTLSINSVESEDIADYYCQQNNNWPTDFGQGTKLELK

SEQ ID NO: 1024 - protein, 107 aa, Artificial Sequence
  Reference Variable LC T097G
DILLTQSPVILSVSPGERVSFSCRASQSIGTNIHWYQQRTNGSPRLLIKYASESISGIPSRFSGSGSGTDFTLSINSVESEDIADYYCQQNNNWPTGFGQGTKLELK

SEQ ID NO: 1025 - protein, 107 aa, Artificial Sequence
  Reference Variable LC T097Q
DILLTQSPVILSVSPGERVSFSCRASQSIGTNIHWYQQRTNGSPRLLIKYASESISGIPSRFSGSGSGTDFTLSINSVESEDIADYYCQQNNNWPTQFGQGTKLELK

SEQ ID NO: 1026 - protein, 107 aa, Artificial Sequence
  Reference Variable LC T097S
DILLTQSPVILSVSPGERVSFSCRASQSIGTNIHWYQQRTNGSPRLLIKYASESISGIPSRFSGSGSGTDFTLSINSVESEDIADYYCQQNNNWPTSFGQGTKLELK

SEQ ID NO: 1027 - protein, 107 aa, Artificial Sequence
  Reference Variable LC T097V
DILLTQSPVILSVSPGERVSFSCRASQSIGTNIHWYQQRTNGSPRLLIKYASESISGIPSRFSGSGSGTDFTLSINSVESEDIADYYCQQNNNWPTVFGQGTKLELK

SEQ ID NO: 1028 - protein, 107 aa, Artificial Sequence
  Reference Variable LC T097K
DILLTQSPVILSVSPGERVSFSCRASQSIGTNIHWYQQRTNGSPRLLIKYASESISGIPSRFSGSGSGTDFTLSINSVESEDIADYYCQQNNNWPTKFGQGTKLELK

SEQ ID NO: 1029 - protein, 107 aa, Artificial Sequence
  Reference Variable LC T097R
DILLTQSPVILSVSPGERVSFSCRASQSIGTNIHWYQQRTNGSPRLLIKYASESISGIPSRFSGSGSGTDFTLSINSVESEDIADYYCQQNNNWPTRFGQGTKLELK

SEQ ID NO: 1030 - protein, 107 aa, Artificial Sequence
  Reference Variable LC F098A
DILLTQSPVILSVSPGERVSFSCRASQSIGTNIHWYQQRTNGSPRLLIKYASESISGIPSRFSGSGSGTDFTLSINSVESEDIADYYCQQNNNWPTTAGQGTKLELK

SEQ ID NO: 1031 - protein, 107 aa, Artificial Sequence
  Reference Variable LC F098M
DILLTQSPVILSVSPGERVSFSCRASQSIGTNIHWYQQRTNGSPRLLIKYASESISGIPSRFSGSGSGTDFTLSINSVESEDIADYYCQQNNNWPTTMGQGTKLELK

SEQ ID NO: 1032 - protein, 107 aa, Artificial Sequence
  Reference Variable LC F098S
DILLTQSPVILSVSPGERVSFSCRASQSIGTNIHWYQQRTNGSPRLLIKYASESISGIPSRFSGSGSGTDFTLSINSVESEDIADYYCQQNNNWPTTSGQGTKLELK

SEQ ID NO: 1033 - protein, 107 aa, Artificial Sequence
  Reference Variable LC F098V
DILLTQSPVILSVSPGERVSFSCRASQSIGTNIHWYQQRTNGSPRLLIKYASESISGIPSRFSGSGSGTDFTLSINSVESEDIADYYCQQNNNWPTTVGQGTKLELK

SEQ ID NO: 1034 - protein, 107 aa, Artificial Sequence
  Reference Variable LC F098Y
DILLTQSPVILSVSPGERVSFSCRASQSIGTNIHWYQQRTNGSPRLLIKYASESISGIPSRFSGSGSGTDFTLSINSVESEDIADYYCQQNNNWPTTYGQGTKLELK

SEQ ID NO: 1035 - protein, 107 aa, Artificial Sequence
  Reference Variable LC G099L
DILLTQSPVILSVSPGERVSFSCRASQSIGTNIHWYQQRTNGSPRLLIKYASESISGIPSRFSGSGSGTDFTLSINSVESEDIADYYCQQNNNWPTTFLQGTKLELK

SEQ ID NO: 1036 - protein, 107 aa, Artificial Sequence
  Reference Variable LC G099D
DILLTQSPVILSVSPGERVSFSCRASQSIGTNIHWYQQRTNGSPRLLIKYASESISGIPSRFSGSGSGTDFTLSINSVESEDIADYYCQQNNNWPTTFDQGTKLELK

SEQ ID NO: 1037 - protein, 107 aa, Artificial Sequence
  Reference Variable LC G099E
DILLTQSPVILSVSPGERVSFSCRASQSIGTNIHWYQQRTNGSPRLLIKYASESISGIPSRFSGSGSGTDFTLSINSVESEDIADYYCQQNNNWPTTFEQGTKLELK

SEQ ID NO: 1038 - protein, 107 aa, Artificial Sequence
  Reference Variable LC G099F
DILLTQSPVILSVSPGERVSFSCRASQSIGTNIHWYQQRTNGSPRLLIKYASESISGIPSRFSGSGSGTDFTLSINSVESEDIADYYCQQNNNWPTTFFQGTKLELK

SEQ ID NO: 1039 - protein, 107 aa, Artificial Sequence
  Reference Variable LC G099I
DILLTQSPVILSVSPGERVSFSCRASQSIGTNIHWYQQRTNGSPRLLIKYASESISGIPSRFSGSGSGTDFTLSINSVESEDIADYYCQQNNNWPTTFIQGTKLELK

SEQ ID NO: 1040 - protein, 107 aa, Artificial Sequence
  Reference Variable LC G099M
DILLTQSPVILSVSPGERVSFSCRASQSIGTNIHWYQQRTNGSPRLLIKYASESISGIPSRFSGSGSGTDFTLSINSVESEDIADYYCQQNNNWPTTFMQGTKLELK

SEQ ID NO: 1041 - protein, 107 aa, Artificial Sequence
  Reference Variable LC G099N
DILLTQSPVILSVSPGERVSFSCRASQSIGTNIHWYQQRTNGSPRLLIKYASESISGIPSRFSGSGSGTDFTLSINSVESEDIADYYCQQNNNWPTTFNQGTKLELK

SEQ ID NO: 1042 - protein, 107 aa, Artificial Sequence
  Reference Variable LC G099S
DILLTQSPVILSVSPGERVSFSCRASQSIGTNIHWYQQRTNGSPRLLIKYASESISGIPSRFSGSGSGTDFTLSINSVESEDIADYYCQQNNNWPTTFSQGTKLELK

SEQ ID NO: 1043 - protein, 107 aa, Artificial Sequence
  Reference Variable LC G099T
DILLTQSPVILSVSPGERVSFSCRASQSIGTNIHWYQQRTNGSPRLLIKYASESISGIPSRFSGSGSGTDFTLSINSVESEDIADYYCQQNNNWPTTFTQGTKLELK

SEQ ID NO: 1044 - protein, 107 aa, Artificial Sequence
  Reference Variable LC G099V
DILLTQSPVILSVSPGERVSFSCRASQSIGTNIHWYQQRTNGSPRLLIKYASESISGIPSRFSGSGSGTDFTLSINSVESEDIADYYCQQNNNWPTTFVQGTKLELK

SEQ ID NO: 1045 - protein, 107 aa, Artificial Sequence
  Reference Variable LC G099K
DILLTQSPVILSVSPGERVSFSCRASQSIGTNIHWYQQRTNGSPRLLIKYASESISGIPSRFSGSGSGTDFTLSINSVESEDIADYYCQQNNNWPTTFKQGTKLELK

SEQ ID NO: 1046 - protein, 107 aa, Artificial Sequence
  Reference Variable LC G099H
DILLTQSPVILSVSPGERVSFSCRASQSIGTNIHWYQQRTNGSPRLLIKYASESISGIPSRFSGSGSGTDFTLSINSVESEDIADYYCQQNNNWPTTFHQGTKLELK

SEQ ID NO: 1047 - protein, 107 aa, Artificial Sequence; identical to SEQ ID NO: 795
  Reference Variable LC Q100C

SEQ ID NO: 1048 - protein, 107 aa, Artificial Sequence; identical to SEQ ID NO: 796
  Reference Variable	LC	Q100D

SEQ ID NO: 1049 - protein, 107 aa, Artificial Sequence; identical to SEQ ID NO: 797
  Reference Variable LC Q100E

SEQ ID NO: 1050 - protein, 107 aa, Artificial Sequence; identical to SEQ ID NO: 798
  Reference Variable LC Q100F

SEQ ID NO: 1051 - protein, 107 aa, Artificial Sequence; identical to SEQ ID NO: 799
  Reference Variable LC Q100I

SEQ ID NO: 1052 - protein, 107 aa, Artificial Sequence; identical to SEQ ID NO: 800
  Reference Variable LC Q100M

SEQ ID NO: 1053 - protein, 107 aa, Artificial Sequence; identical to SEQ ID NO: 801
  Reference Variable LC Q100N

SEQ ID NO: 1054 - protein, 107 aa, Artificial Sequence; identical to SEQ ID NO: 802
  Reference Variable LC Q100P

SEQ ID NO: 1055 - protein, 107 aa, Artificial Sequence; identical to SEQ ID NO: 803
  Reference Variable LC Q100T

SEQ ID NO: 1056 - protein, 107 aa, Artificial Sequence; identical to SEQ ID NO: 804
  Reference Variable LC Q100V

SEQ ID NO: 1057 - protein, 107 aa, Artificial Sequence; identical to SEQ ID NO: 805
  Reference Variable LC Q100W

SEQ ID NO: 1058 - protein, 107 aa, Artificial Sequence; identical to SEQ ID NO: 806
  Reference Variable LC Q100Y

SEQ ID NO: 1059 - protein, 107 aa, Artificial Sequence; identical to SEQ ID NO: 807
  Reference Variable LC Q100K

SEQ ID NO: 1060 - protein, 107 aa, Artificial Sequence; identical to SEQ ID NO: 808
  Reference Variable LC Q100H

SEQ ID NO: 1061 - protein, 107 aa, Artificial Sequence; identical to SEQ ID NO: 809
  Reference Variable	LC	Q100R

SEQ ID NO: 1062 - protein, 119 aa, Artificial Sequence
  Variable HC Y104D/Q111P
QVQLKQSGPGLVQPSQSLSITCTVSGFSLTNYGVHWVRQSPGKGLEWLGVIWSGGNTDYNTPFTSRLSINKDNSKSQVFFKMNSLQSNDTAIYYCARALTYYDDEFAYWGPGTLVTVSA

SEQ ID NO: 1063 - protein, 119 aa, Artificial Sequence
  Variable HC V24E
QVQLKQSGPGLVQPSQSLSITCTESGFSLTNYGVHWVRQSPGKGLEWLGVIWSGGNTDYNTPFTSRLSINKDNSKSQVFFKMNSLQSNDTAIYYCARALTYYDYEFAYWGQGTLVTVSA

SEQ ID NO: 1064 - protein, 119 aa, Artificial Sequence
  Variable HC Q111V
QVQLKQSGPGLVQPSQSLSITCTVSGFSLTNYGVHWVRQSPGKGLEWLGVIWSGGNTDYNTPFTSRLSINKDNSKSQVFFKMNSLQSNDTAIYYCARALTYYDYEFAYWGVGTLVTVSA

SEQ ID NO: 1065 - protein, 107 aa, Artificial Sequence
  Variable LC T5P
DILLPQSPVILSVSPGERVSFSCRASQSIGTNIHWYQQRTNGSPRLLIKYASESISGIPSRFSGSGSGTDFTLSINSVESEDIADYYCQQNNNWPTTFGAGTKLELK

SEQ ID NO: 1066 - protein, 107 aa, Artificial Sequence
  Variable LC R24G
DILLTQSPVILSVSPGERVSFSCGASQSIGTNIHWYQQRTNGSPRLLIKYASESISGIPSRFSGSGSGTDFTLSINSVESEDIADYYCQQNNNWPTTFGAGTKLELK

SEQ ID NO: 1067 - protein, 107 aa, Artificial Sequence
  Reference Variable T5P
DILLPQSPVILSVSPGERVSFSCRASQSIGTNIHWYQQRTNGSPRLLIKYASESISGIPSRFSGSGSGTDFTLSINSVESEDIADYYCQQNNNWPTTFGQGTKLELK

SEQ ID NO: 1068 - protein, 107 aa, Artificial Sequence
  Reference Variable R24G
DILLTQSPVILSVSPGERVSFSCGASQSIGTNIHWYQQRTNGSPRLLIKYASESISGIPSRFSGSGSGTDFTLSINSVESEDIADYYCQQNNNWPTTFGQGTKLELK

SEQ ID NO: 1069 - protein, 330 aa, Artificial Sequence
  Cetuximab IgG1 heavy chain constant region
ASTKGPSVFPLAPSSKSTSGGTAALGCLVKDYFPEPVTVSWNSGALTSGVHTFPAVLQSSGLYSLSSVVTVPSSSLGTQTYICNVNHKPSNTKVDKRVEPKSCDKTHTCPPCPAPELLGGPSVFLFPPKPKDTLMISRTPEVTCVVVDVSHEDPEVKFNWYVDGVEVHNAKTKPREEQYNSTYRVVSVLTVLHQDWLNGKEYKCKVSNKALPAPIEKTISKAKGQPREPQVYTLPPSRDELTKNQVSLTCLVKGFYPSDIAVEWESNGQPENNYKTTPPVLDSDGSFFLYSKLTVDKSRWQQGNVFSCSVMHEALHNHYTQKSLSLSPGK

SEQ ID NO: 1070 - protein, 330 aa, Artificial Sequence [sequence omitted]

SEQ ID NO: 1071 - protein, 106 aa, Artificial Sequence
  cetuximab kappa light chain constant region
RTVAAPSVFIFPPSDEQLKSGTASVVCLLNNFYPREAKVQWKVDNALQSGNSQESVTEQDSKDSTYSLSSTLTLSKADYEKHKVYACEVTHQGLSSPVTKSFNRGA

SEQ ID NO: 1072 - protein, 107 aa, Homo sapiens [sequence omitted]

SEQ ID NO: 1073 - protein, 104 aa, Homo sapiens
  human lambda light chain constant region
QPKAAPSVTLFPPSSEELQANKATLVCLISDFYPGAVTVAWKADSSPVKAGVETTTPSKQSNNKYAASSYLSLTPEQWKSHRSYSCQVTHEGSTVEKTVAPTEC

SEQ ID NO: 1074 - protein, 18 aa, Artificial Sequence
  Linker
GGSSRSSSSGGGGSGGGG

SEQ ID NO: 1075 - protein, 15 aa, Artificial Sequence
  Linker
GSGRSGGGGSGGGGS

SEQ ID NO: 1076 - protein, 14 aa, Artificial Sequence
  Linker
EGKSSGSGSESKST

SEQ ID NO: 1077 - protein, 15 aa, Artificial Sequence
  Linker
EGKSSGSGSESKSTQ

SEQ ID NO: 1078 - protein, 14 aa, Artificial Sequence
  Linker
EGKSSGSGSESKVD

SEQ ID NO: 1079 - protein, 14 aa, Artificial Sequence
  Linker
GSTSGSGKSSEGKG

SEQ ID NO: 1080 - protein, 18 aa, Artificial Sequence
  Linker
KESGSVSSEQLAQFRSLD

SEQ ID NO: 1081 - protein, 16 aa, Artificial Sequence
  Linker
ESGSVSSEELAFRSLD

SEQ ID NO: 1082 - protein, 10 aa, Artificial Sequence
  c-Myc
EQKLISEEDL

SEQ ID NO: 1083 - protein, 9 aa, Artificial Sequence
  HA
YPYDVPDYA

SEQ ID NO: 1084 - protein, 11 aa, Artificial Sequence
  VSV-G
YTDIEMNRLGK

SEQ ID NO: 1085 - protein, 11 aa, Artificial Sequence
  HSV
QPELAPEDPED

SEQ ID NO: 1086 - protein, 14 aa, Artificial Sequence
  V5
GKPIPNPLLGLDST

SEQ ID NO: 1087 - protein, 5 aa, Artificial Sequence
  Poly Arg
RRRRR

SEQ ID NO: 1088 - protein, 8 aa, Artificial Sequence
  Strep-tag-II
WSHPQFEK

SEQ ID NO: 1089 - protein, 15 aa, Artificial Sequence
  S tag
KETAAAKFERQHMDS

SEQ ID NO: 1090 - protein, 22 aa, Artificial Sequence
  3x FLAG tag
DYKDHDGDYKDHDIDYKDDDDK

SEQ ID NO: 1091 - protein, 19 aa, Artificial Sequence
  HAT
KDHLIHNVHKEFHAHAHNK

SEQ ID NO: 1092 - protein, 38 aa, Artificial Sequence
  SBP
MDEKTTGWRGGHVVEGLAGELEQLRARLEHHPQGQREP

SEQ ID NO: 1093 - protein, 119 aa, Artificial Sequence
  Variable HC V24E/F27R/R97H/Q111P
QVQLKQSGPGLVQPSQSLSITCTESGRSLTNYGVHWVRQSPGKGLEWLGVIWSGGNTDYNTPFTSRLSINKDNSKSQVFFKMNSLQSNDTAIYYCAHALTYYDYEFAYWGPGTLVTVSA

SEQ ID NO: 1094 - protein, 5 aa, Artificial Sequence
  Linker
GGGGS

SEQ ID NO: 1095 - protein, 10 aa, Artificial Sequence
  Linker
GGGGSGGGGS

SEQ ID NO: 1096 - protein, 20 aa, Artificial Sequence
  Linker
GGGGSGGGGSGGGGSGGGGS

SEQ ID NO: 1097 - protein, 25 aa, Artificial Sequence
  Linker
GGGGSGGGGSGGGGSGGGGSGGGGS

SEQ ID NO: 1098 - protein, 119 aa, Artificial Sequence
  Variable HC S28C
QVQLKQSGPGLVQPSQSLSITCTVSGFCLTNYGVHWVRQSPGKGLEWLGVIWSGGNTDYNTPFTSRLSINKDNSKSQVFFKMNSLQSNDTAIYYCARALTYYDYEFAYWGQGTLVTVSA

SEQ ID NO: 1099 - protein, 119 aa, Artificial Sequence
  Variable HC F63P
QVQLKQSGPGLVQPSQSLSITCTVSGFSLTNYGVHWVRQSPGKGLEWLGVIWSGGNTDYNTPPTSRLSINKDNSKSQVFFKMNSLQSNDTAIYYCARALTYYDYEFAYWGQGTLVTVSA

SEQ ID NO: 1100 - protein, 119 aa, Artificial Sequence
  Variable HC L67G
QVQLKQSGPGLVQPSQSLSITCTVSGFSLTNYGVHWVRQSPGKGLEWLGVIWSGGNTDYNTPFTSRGSINKDNSKSQVFFKMNSLQSNDTAIYYCARALTYYDYEFAYWGQGTLVTVSA

SEQ ID NO: 1101 - protein, 119 aa, Artificial Sequence
  Variable HC D72P
QVQLKQSGPGLVQPSQSLSITCTVSGFSLTNYGVHWVRQSPGKGLEWLGVIWSGGNTDYNTPFTSRLSINKPNSKSQVFFKMNSLQSNDTAIYYCARALTYYDYEFAYWGQGTLVTVSA

SEQ ID NO: 1102 - protein, 119 aa, Artificial Sequence
  Variable HC K75G
QVQLKQSGPGLVQPSQSLSITCTVSGFSLTNYGVHWVRQSPGKGLEWLGVIWSGGNTDYNTPFTSRLSINKDNSGSQVFFKMNSLQSNDTAIYYCARALTYYDYEFAYWGQGTLVTVSA

SEQ ID NO: 1103 - protein, 119 aa, Artificial Sequence
  Variable HC K75P
QVQLKQSGPGLVQPSQSLSITCTVSGFSLTNYGVHWVRQSPGKGLEWLGVIWSGGNTDYNTPFTSRLSINKDNSPSQVFFKMNSLQSNDTAIYYCARALTYYDYEFAYWGQGTLVTVSA

SEQ ID NO: 1104 - protein, 119 aa, Artificial Sequence
  Variable HC S76I
QVQLKQSGPGLVQPSQSLSITCTVSGFSLTNYGVHWVRQSPGKGLEWLGVIWSGGNTDYNTPFTSRLSINKDNSKIQVFFKMNSLQSNDTAIYYCARALTYYDYEFAYWGQGTLVTVSA

SEQ ID NO: 1105 - protein, 119 aa, Artificial Sequence
  Variable HC S76V
QVQLKQSGPGLVQPSQSLSITCTVSGFSLTNYGVHWVRQSPGKGLEWLGVIWSGGNTDYNTPFTSRLSINKDNSKVQVFFKMNSLQSNDTAIYYCARALTYYDYEFAYWGQGTLVTVSA

SEQ ID NO: 1106 - protein, 119 aa, Artificial Sequence
  Variable HC Q111I
QVQLKQSGPGLVQPSQSLSITCTVSGFSLTNYGVHWVRQSPGKGLEWLGVIWSGGNTDYNTPFTSRLSINKDNSKSQVFFKMNSLQSNDTAIYYCARALTYYDYEFAYWGIGTLVTVSA

SEQ ID NO: 1107 - protein, 119 aa, Artificial Sequence; identical to SEQ ID NO: 1064
  Variable HC Q111V

SEQ ID NO: 1108 - protein, 103 aa, Homo sapiens
  Human IgG1 CH1
ASTKGPSVFPLAPSSKSTSGGTAALGCLVKDYFPEPVTVSWNSGALTSGVHTFPAVLQSSGLYSLSSVVTVPSSSLGTQTYICNVNHKPSNTKVDKKVEPKSC

SEQ ID NO: 1109 - DNA, 3091 bp, Artificial Sequence
  Cetuximab LC and HC
ctctcttaaggtagccttgcagaagttggtcgtgaggcactgggcaggtaagtatcaaggttacaagacaggtttaaggtgaccaatagaaactgggcttgtcgagacagagaagactcttgcgtttctgataggcacctattggtcttactgacatccactttgcctttctctccacaggtgtccactcccagttcaattacagctcttaaggctagagtacttaatacgactcactataggctagtctcgtcgacgagactagcatggacatgagggtccccgctcagctcctggggctcctgctgctctggctcccaggtgccaagtgtgacatcttgctgactcagtctccagtcatcctgtctgtgagtccaggagaaagagtcagtttctcctgcagggccagtcagagtattggcacaaacatacactggtatcagcaaagaacaaatggttctccaaggcttctcataaagtatgcttctgagtctatctctgggatcccttccaggtttagtggcagtggatcagggacagattttactcttagcatcaacagtgtggagtctgaagatattgcagattattactgtcaacaaaataataactggccaaccacgttcggccaagggaccaaggtggaaatcaaacgtacggtggctgcaccatctgtcttcatcttcccgccatctgatgagcagttgaaatctggaactgcctctgttgtgtgcctgctgaataacttctatcccagagaggccaaagtacagtggaaggtggataacgccctccaatcgggtaactcccaggagagtgtcacagagcaggacagcaaggacagcacctacagcctcagcagcaccctgacgctgagcaaagcagactacgagaaacacaaagtctacgcctgcgaagtcacccatcagggcctgagctcgcccgtcacaaagagcttcaacaggggagagtgttgactcgaggcgcgccgagcatgcatctagggcggccaattccgcccctctccccccccccccctaacgttactggccgaagccgcttggaataaggccggtgtgcgtttgtctatatgttattttccaccatattgccgtcttttggcaatgtgagggcccggaaacctggccctgtcttcttgacgagcattcctaggggtctttcccctctcgccaaaggaatgcaaggtctgttgaatgtcgtgaaggaagcagttcctctggaagcttcttgaagacaaacaacgtctgtagcgaccctttgcaggcagcggaaccccccacctggcgacaggtgcctctgcggccaaaagccacgtgtataagatacacctgcaaaggcggcacaaccccagtgccacgttgtgagttggatagttgtggaaagagtcaaatggctctcctcaagcgtattcaacaaggggctgaaggatgcccagaaggtaccccattgtatgggatctgatctggggcctcggtgcacatgctttacatgtgtttagtcgaggttaaaaaaacgtctaggccccccgaaccacggggacgtggttttcctttgaaaaacacgatgataatatggccacaaccatggagtttgggctgagctggctttttcttgtggctattttaaaaggtgtccagtgtcaggtgcagctgaagcagtcaggacctggcctagtgcagccctcacagagcctgtccatcacctgcacagtctctggtttctcattaactaactatggtgtacactgggttcgccagtctccaggaaagggtctggagtggctgggagtgatatggagtggtggaaacacagactataatacacctttcacatccagactgagcatcaacaaggacaattccaagagccaagttttctttaaaatgaacagtctgcaatctaatgacacagccatatattactgtgccagagccctcacctactatgattacgagtttgcttactggggccagggaacgctggtcaccgtcagctcagcctccaccaagggcccatcggtcttccccctggcaccctcctccaagagcacctctgggggcacagcggccctgggctgcctggtcaaggactacttccccgaaccggtgacggtgtcgtggaactcaggcgccctgaccagcggcgtgcacaccttcccggctgtcctacagtcctcaggactctactccctcagcagcgtggtgaccgtgccctccagcagcttgggcacccagacctacatctgcaacgtgaatcacaagcccagcaacaccaaggtggacaagaaagttgagcccaaatcttgtgacaaaactcacacatgcccaccgtgcccagcacctgaactcctggggggaccgtcagtcttcctcttccccccaaaacccaaggacaccctcatgatctcccggacccctgaggtcacatgcgtggtggtggacgtgagccacgaagaccctgaggtcaagttcaactggtacgtggacggcgtggaggtgcataatgccaagacaaagccgcgggaggagcagtacaacagcacgtaccgtgtggtcagcgtcctcaccgtcctgcaccaggactggctgaatggcaaggagtacaagtgcaaggtcagcaacaaagccctcccagcccccatcgagaaaaccatctccaaagccaaagggcagccccgagaaccacaggtgtacaccctgcccccatcccgggatgagctgaccaagaaccaggtcagcctgacctgcctggtcaaaggcttctatcccagcgacatcgccgtggagtgggagagcaatgggcagccggagaacaactacaagaccacgcctcccgtgctggactccgacggctccttcttcctctacagcaagctcaccgtggacaagagcaggtggcagcaggggaacgtcttctcatgctccgtgatgcatgaggctctgcacaaccactacacgcagaagagcctctccctgtctccgggtaaagattacaaggatgacgacgataagtgagcggccgcttccctttagtgagggttaatgcttcgagcagacatgataagatacat

SEQ ID NO: 1110 - DNA, 708 bp, Artificial Sequence
  Cetuximab LC DNA
atggacatgagggtccccgctcagctcctggggctcctgctgctctggctcccaggtgccaagtgtgacatcttgctgactcagtctccagtcatcctgtctgtgagtccaggagaaagagtcagtttctcctgcagggccagtcagagtattggcacaaacatacactggtatcagcaaagaacaaatggttctccaaggcttctcataaagtatgcttctgagtctatctctgggatcccttccaggtttagtggcagtggatcagggacagattttactcttagcatcaacagtgtggagtctgaagatattgcagattattactgtcaacaaaataataactggccaaccacgttcggccaagggaccaaggtggaaatcaaacgtacggtggctgcaccatctgtcttcatcttcccgccatctgatgagcagttgaaatctggaactgcctctgttgtgtgcctgctgaataacttctatcccagagaggccaaagtacagtggaaggtggataacgccctccaatcgggtaactcccaggagagtgtcacagagcaggacagcaaggacagcacctacagcctcagcagcaccctgacgctgagcaaagcagactacgagaaacacaaagtctacgcctgcgaagtcacccatcagggcctgagctcgcccgtcacaaagagcttcaacaggggagagtgt

SEQ ID NO: 1111 - DNA, 1404 bp, Artificial Sequence
  Cetuximab HC DNA
atggagtttgggctgagctggctttttcttgtggctattttaaaaggtgtccagtgtcaggtgcagctgaagcagtcaggacctggcctagtgcagccctcacagagcctgtccatcacctgcacagtctctggtttctcattaactaactatggtgtacactgggttcgccagtctccaggaaagggtctggagtggctgggagtgatatggagtggtggaaacacagactataatacacctttcacatccagactgagcatcaacaaggacaattccaagagccaagttttctttaaaatgaacagtctgcaatctaatgacacagccatatattactgtgccagagccctcacctactatgattacgagtttgcttactggggccagggaacgctggtcaccgtcagctcagcctccaccaagggcccatcggtcttccccctggcaccctcctccaagagcacctctgggggcacagcggccctgggctgcctggtcaaggactacttccccgaaccggtgacggtgtcgtggaactcaggcgccctgaccagcggcgtgcacaccttcccggctgtcctacagtcctcaggactctactccctcagcagcgtggtgaccgtgccctccagcagcttgggcacccagacctacatctgcaacgtgaatcacaagcccagcaacaccaaggtggacaagaaagttgagcccaaatcttgtgacaaaactcacacatgcccaccgtgcccagcacctgaactcctggggggaccgtcagtcttcctcttccccccaaaacccaaggacaccctcatgatctcccggacccctgaggtcacatgcgtggtggtggacgtgagccacgaagaccctgaggtcaagttcaactggtacgtggacggcgtggaggtgcataatgccaagacaaagccgcgggaggagcagtacaacagcacgtaccgtgtggtcagcgtcctcaccgtcctgcaccaggactggctgaatggcaaggagtacaagtgcaaggtcagcaacaaagccctcccagcccccatcgagaaaaccatctccaaagccaaagggcagccccgagaaccacaggtgtacaccctgcccccatcccgggatgagctgaccaagaaccaggtcagcctgacctgcctggtcaaaggcttctatcccagcgacatcgccgtggagtgggagagcaatgggcagccggagaacaactacaagaccacgcctcccgtgctggactccgacggctccttcttcctctacagcaagctcaccgtggacaagagcaggtggcagcaggggaacgtcttctcatgctccgtgatgcatgaggctctgcacaaccactacacgcagaagagcctctccctgtctccgggtaaa

SEQ ID NO: 1112 - protein, 119 aa, Artificial Sequence
  Variable HC S25C/Y104D
QVQLKQSGPGLVQPSQSLSITCTVCGFSLTNYGVHWVRQSPGKGLEWLGVIWSGGNTDYNTPFTSRLSINKDNSKSQVFFKMNSLQSNDTAIYYCARALTYYDDEFAYWGQGTLVTVSA

SEQ ID NO: 1113 - protein, 119 aa, Artificial Sequence
  Variable HC S25C/Q111P
QVQLKQSGPGLVQPSQSLSITCTVCGFSLTNYGVHWVRQSPGKGLEWLGVIWSGGNTDYNTPFTSRLSINKDNSKSQVFFKMNSLQSNDTAIYYCARALTYYDYEFAYWGPGTLVTVSA

SEQ ID NO: 1114 - protein, 119 aa, Artificial Sequence
  Variable HC	S53G/Y104D
QVQLKQSGPGLVQPSQSLSITCTVSGFSLTNYGVHWVRQSPGKGLEWLGVIWGGGNTDYNTPFTSRLSINKDNSKSQVFFKMNSLQSNDTAIYYCARALTYYDDEFAYWGQGTLVTVSA

SEQ ID NO: 1115 - protein, 119 aa, Artificial Sequence
  Variable HC	S53G/Y104D/Q111P
QVQLKQSGPGLVQPSQSLSITCTVSGFSLTNYGVHWVRQSPGKGLEWLGVIWGGGNTDYNTPFTSRLSINKDNSKSQVFFKMNSLQSNDTAIYYCARALTYYDDEFAYWGPGTLVTVSA

SEQ ID NO: 1116 - protein, 119 aa, Artificial Sequence
  Variable HC	S25V/Y104D
QVQLKQSGPGLVQPSQSLSITCTVVGFSLTNYGVHWVRQSPGKGLEWLGVIWSGGNTDYNTPFTSRLSINKDNSKSQVFFKMNSLQSNDTAIYYCARALTYYDDEFAYWGQGTLVTVSA

SEQ ID NO: 1117 - protein, 119 aa, Artificial Sequence
  Variable HC	S25V/Y104D/Q111P
QVQLKQSGPGLVQPSQSLSITCTVVGFSLTNYGVHWVRQSPGKGLEWLGVIWSGGNTDYNTPFTSRLSINKDNSKSQVFFKMNSLQSNDTAIYYCARALTYYDDEFAYWGPGTLVTVSA

SEQ ID NO: 1118 - protein, 119 aa, Artificial Sequence
  Variable HC	S25V/S53G/Y104D
QVQLKQSGPGLVQPSQSLSITCTVVGFSLTNYGVHWVRQSPGKGLEWLGVIWGGGNTDYNTPFTSRLSINKDNSKSQVFFKMNSLQSNDTAIYYCARALTYYDDEFAYWGQGTLVTVSA

SEQ ID NO: 1119 - protein, 119 aa, Artificial Sequence
  Variable HC	S25V/S53G/Y104D/Q111P
QVQLKQSGPGLVQPSQSLSITCTVVGFSLTNYGVHWVRQSPGKGLEWLGVIWGGGNTDYNTPFTSRLSINKDNSKSQVFFKMNSLQSNDTAIYYCARALTYYDDEFAYWGPGTLVTVSA

SEQ ID NO: 1120 - protein, 119 aa, Artificial Sequence
  Variable HC	F27G/Y104D
QVQLKQSGPGLVQPSQSLSITCTVSGGSLTNYGVHWVRQSPGKGLEWLGVIWSGGNTDYNTPFTSRLSINKDNSKSQVFFKMNSLQSNDTAIYYCARALTYYDDEFAYWGQGTLVTVSA

SEQ ID NO: 1121 - protein, 119 aa, Artificial Sequence
  Variable HC	F27G/Y104D/Q111P
QVQLKQSGPGLVQPSQSLSITCTVSGGSLTNYGVHWVRQSPGKGLEWLGVIWSGGNTDYNTPFTSRLSINKDNSKSQVFFKMNSLQSNDTAIYYCARALTYYDDEFAYWGPGTLVTVSA

SEQ ID NO: 1122 - protein, 119 aa, Artificial Sequence
  Variable HC	F27G/S53G/Y104D
QVQLKQSGPGLVQPSQSLSITCTVSGGSLTNYGVHWVRQSPGKGLEWLGVIWGGGNTDYNTPFTSRLSINKDNSKSQVFFKMNSLQSNDTAIYYCARALTYYDDEFAYWGQGTLVTVSA

SEQ ID NO: 1123 - protein, 119 aa, Artificial Sequence
  Variable HC	F27G/S53G/Y104D/Q111P
QVQLKQSGPGLVQPSQSLSITCTVSGGSLTNYGVHWVRQSPGKGLEWLGVIWGGGNTDYNTPFTSRLSINKDNSKSQVFFKMNSLQSNDTAIYYCARALTYYDDEFAYWGPGTLVTVSA

SEQ ID NO: 1124 - protein, 119 aa, Artificial Sequence
  Variable HC	T30F/Y104D
QVQLKQSGPGLVQPSQSLSITCTVSGFSLFNYGVHWVRQSPGKGLEWLGVIWSGGNTDYNTPFTSRLSINKDNSKSQVFFKMNSLQSNDTAIYYCARALTYYDDEFAYWGQGTLVTVSA

SEQ ID NO: 1125 - protein, 119 aa, Artificial Sequence
  Variable HC	T30F/Y104D/Q111P
QVQLKQSGPGLVQPSQSLSITCTVSGFSLFNYGVHWVRQSPGKGLEWLGVIWSGGNTDYNTPFTSRLSINKDNSKSQVFFKMNSLQSNDTAIYYCARALTYYDDEFAYWGPGTLVTVSA

SEQ ID NO: 1126 - protein, 119 aa, Artificial Sequence
  Variable HC	T30F/S53G/Y104D
QVQLKQSGPGLVQPSQSLSITCTVSGFSLFNYGVHWVRQSPGKGLEWLGVIWGGGNTDYNTPFTSRLSINKDNSKSQVFFKMNSLQSNDTAIYYCARALTYYDDEFAYWGQGTLVTVSA

SEQ ID NO: 1127 - protein, 119 aa, Artificial Sequence
  Variable HC	T30F/S53G/Y104D/Q111P
QVQLKQSGPGLVQPSQSLSITCTVSGFSLFNYGVHWVRQSPGKGLEWLGVIWGGGNTDYNTPFTSRLSINKDNSKSQVFFKMNSLQSNDTAIYYCARALTYYDDEFAYWGPGTLVTVSA

SEQ ID NO: 1128 - protein, 119 aa, Artificial Sequence
  Variable HC	D72L/Y104D
QVQLKQSGPGLVQPSQSLSITCTVSGFSLTNYGVHWVRQSPGKGLEWLGVIWSGGNTDYNTPFTSRLSINKLNSKSQVFFKMNSLQSNDTAIYYCARALTYYDDEFAYWGQGTLVTVSA

SEQ ID NO: 1129 - protein, 119 aa, Artificial Sequence
  Variable HC	D72L/Y104D/Q111P
QVQLKQSGPGLVQPSQSLSITCTVSGFSLTNYGVHWVRQSPGKGLEWLGVIWSGGNTDYNTPFTSRLSINKLNSKSQVFFKMNSLQSNDTAIYYCARALTYYDDEFAYWGPGTLVTVSA

SEQ ID NO: 1130 - protein, 119 aa, Artificial Sequence
  Variable HC	S53G/D72L/Y104D
QVQLKQSGPGLVQPSQSLSITCTVSGFSLTNYGVHWVRQSPGKGLEWLGVIWGGGNTDYNTPFTSRLSINKLNSKSQVFFKMNSLQSNDTAIYYCARALTYYDDEFAYWGQGTLVTVSA

SEQ ID NO: 1131 - protein, 119 aa, Artificial Sequence
  Variable HC	S53G/D72L/Y104D/Q111P
QVQLKQSGPGLVQPSQSLSITCTVSGFSLTNYGVHWVRQSPGKGLEWLGVIWGGGNTDYNTPFTSRLSINKLNSKSQVFFKMNSLQSNDTAIYYCARALTYYDDEFAYWGPGTLVTVSA

SEQ ID NO: 1132 - DNA, 708 bp, Artificial Sequence
  Cetuximab light chain DNA variant encoding V104L/I106L
atggacatgagggtccccgctcagctcctggggctcctgctgctctggctcccaggtgccaagtgtgacatcttgctgactcagtctccagtcatcctgtctgtgagtccaggagaaagagtcagtttctcctgcagggccagtcagagtattggcacaaacatacactggtatcagcaaagaacaaatggttctccaaggcttctcataaagtatgcttctgagtctatctctgggatcccttccaggtttagtggcagtggatcagggacagattttactcttagcatcaacagtgtggagtctgaagatattgcagattattactgtcaacaaaataataactggccaaccacgttcggccaagggaccaagctggagctgaaacgtacggtggctgcaccatctgtcttcatcttcccgccatctgatgagcagttgaaatctggaactgcctctgttgtgtgcctgctgaataacttctatcccagagaggccaaagtacagtggaaggtggataacgccctccaatcgggtaactcccaggagagtgtcacagagcaggacagcaaggacagcacctacagcctcagcagcaccctgacgctgagcaaagcagactacgagaaacacaaagtctacgcctgcgaagtcacccatcagggcctgagctcgcccgtcacaaagagcttcaacaggggagagtgt

SEQ ID NO: 1133 - DNA, 1404 bp, Artificial Sequence
  Cetuximab heavy chain DNA variant encoding S119A
atggagtttgggctgagctggctttttcttgtggctattttaaaaggtgtccagtgtcaggtgcagctgaagcagtcaggacctggcctagtgcagccctcacagagcctgtccatcacctgcacagtctctggtttctcattaactaactatggtgtacactgggttcgccagtctccaggaaagggtctggagtggctgggagtgatatggagtggtggaaacacagactataatacacctttcacatccagactgagcatcaacaaggacaattccaagagccaagttttctttaaaatgaacagtctgcaatctaatgacacagccatatattactgtgccagagccctcacctactatgattacgagtttgcttactggggccagggaacgctggtcaccgtcagcgcagcctccaccaagggcccatcggtcttccccctggcaccctcctccaagagcacctctgggggcacagcggccctgggctgcctggtcaaggactacttccccgaaccggtgacggtgtcgtggaactcaggcgccctgaccagcggcgtgcacaccttcccggctgtcctacagtcctcaggactctactccctcagcagcgtggtgaccgtgccctccagcagcttgggcacccagacctacatctgcaacgtgaatcacaagcccagcaacaccaaggtggacaagaaagttgagcccaaatcttgtgacaaaactcacacatgcccaccgtgcccagcacctgaactcctggggggaccgtcagtcttcctcttccccccaaaacccaaggacaccctcatgatctcccggacccctgaggtcacatgcgtggtggtggacgtgagccacgaagaccctgaggtcaagttcaactggtacgtggacggcgtggaggtgcataatgccaagacaaagccgcgggaggagcagtacaacagcacgtaccgtgtggtcagcgtcctcaccgtcctgcaccaggactggctgaatggcaaggagtacaagtgcaaggtcagcaacaaagccctcccagcccccatcgagaaaaccatctccaaagccaaagggcagccccgagaaccacaggtgtacaccctgcccccatcccgggatgagctgaccaagaaccaggtcagcctgacctgcctggtcaaaggcttctatcccagcgacatcgccgtggagtgggagagcaatgggcagccggagaacaactacaagaccacgcctcccgtgctggactccgacggctccttcttcctctacagcaagctcaccgtggacaagagcaggtggcagcaggggaacgtcttctcatgctccgtgatgcatgaggctctgcacaaccactacacgcagaagagcctctccctgtctccgggtaaa

SEQ ID NO: 1134 - protein, 119 aa, Artificial Sequence
  DP-h1, 2, 4, 5, 6, 8 heavy chain protein
QVQLQQSGPGLVKPSQTLSLTCAISGFSLTNYGVHWIRQPPGKGLEWIGVIWSGGNTDYNTPFTSRFTISRDDSKNTAYLQMNSLKTEDTAVYYCARALTYYDDEFAYWGPGTLVTVSA

SEQ ID NO: 1135 - protein, 119 aa, Artificial Sequence
  DP-h3, 7 heavy chain protein
EVQLVQSGAEVKKPGATVKISCKVSGFSLTNYGVHWVRQATGQGLEWMGVIWSGGNTDYNTPFTSRFTISRDDSKNTAYLQMNSLKTEDTAVYYCARALTYYDDEFAYWGPGTLVTVSA

SEQ ID NO: 1136 - protein, 119 aa, Artificial Sequence
  DP-h9, 12, 14 heavy chain protein
EVQLVQSGAEVKKPGATVKISCKVSGFSLTNYGVHWIRQSPSRGLEWLGVIWSGGNTDYNTPFTSRLTISKDTSKNQVVLTMTNMDPVDTATYYCARALTYYDDEFAYWGPGTLVTVSA

SEQ ID NO: 1137 - protein, 119 aa, Artificial Sequence
  DP-h10, 13 heavy chain protein
EVQLVQSGAEVKKPGATVKISCKVSGFSLTNYGVHWIRQPPGKGLEWIGVIWSGGNTDYNTPFTSRFTISRDNAKNSLYLQMNSLRAEDTAVYYCARALTYYDDEFAYWGPGTLVTVSA

SEQ ID NO: 1138 - protein, 107 aa, Artificial Sequence
  DP-h1, 3 light chain protein
AIQLTQSPSSLSASVGDRVTITCRASQSIGTNIHWYQQKPGQAPRLLIYYASESISGVPSRFSGSGSGTDFTLTISSLQPEDFATYYCQQNNNWPTTFGQGTKLELK

SEQ ID NO: 1139 - protein, 107 aa, Artificial Sequence
  DP-h2 light chain protein
AIQLTQSPSSLSASVGDRVTITCRASQSIGTNIHWYLQKPGQSPQLLIYYASESISGVPSRFSGSGSGTDFTLTISSLQPEDFATYYCQQNNNWPTTFGQGTKLELK

SEQ ID NO: 1140 - protein, 107 aa, Artificial Sequence
  DP-h4 light chain protein
AIQLTQSPSSLSASVGDRVTITCRASQSIGTNIHWYQQKPGKAPKLLIYYASESISGVPSRFSGSGSGTDFTLTISSLQPEDFATYYCQQNNNWPTTFGQGTKLELK

SEQ ID NO: 1141 - protein, 107 aa, Artificial Sequence
  DP-h5 light chain protein
DIQMTQSPSSLSASVGDRVTITCRASQSIGTNIHWYQQKPGQAPRLLIYYASESISGIPDRFSGSGSGTDFTLTISRLEPEDFAVYYCQQNNNWPTTFGQGTKLELK

SEQ ID NO: 1142 - protein, 107 aa, Artificial Sequence
  DP-h6, 7, 9 light chain protein
AIQLTQSPSSLSASVGDRVTITCRASQSIGTNIHWYLQKPGQSPQLLIYYASESISGIPDRFSGSGSGTDFTLTISRLEPEDFAVYYCQQNNNWPTTFGQGTKLELK

SEQ ID NO: 1143 - protein, 107 aa, Artificial Sequence
  DP-h8 light chain protein
AIQLTQSPSSLSASVGDRVTITCRASQSIGTNIHWYQQKPGQAPRLLIYYASESISGIPARFSGSGSGTEFTLTISSLQSEDFAVYYCQQNNNWPTTFGQGTKLELK

SEQ ID NO: 1144 - protein, 107 aa, Artificial Sequence
  DP-h10, 12 light chain protein
EIVLTQSPATLSLSPGERATLSCRASQSIGTNIHWYQQKPGKAPKLLIYYASESISGIPDRFSGSGSGTDFTLTISRLEPEDFAVYYCQQNNNWPTTFGQGTKLELK

SEQ ID NO: 1145 - protein, 107 aa, Artificial Sequence
  DP-h13, 14 light chain protein
EIVLTQSPATLSLSPGERATLSCRASQSIGTNIHWYQQKPGQAPRLLIYYASESISGVPSRFSGSGSGTEFTLTISSLQPDDFATYYCQQNNNWPTTFGQGTKLELK

SEQ ID NO: 1146 - protein, 119 aa, Artificial Sequence
  FDP-h1, 7*, 19, 20, 21 heavy chain protein
EVQLVQSGAEVKKPGATVKISCKVSGFSLFNYGVHWIRQPPGKGLEWIGVIWSGGNTDYNTPFTSRFTISRDNSKNTLYLQMNSLRAEDTAVYYCARALTYYDDEFAYWGPGTLVTVSA

SEQ ID NO: 1147 - protein, 119 aa, Artificial Sequence
  FDP-h2 heavy chain protein
EVQLVQSGAEVKKPGATVKISCKVSGFSLFNYGVHWVRQARGQRLEWIGVIWSGGNTDYNTPFTSRFTISRDDSKNTAYLQMNSLKTEDTAVYYCARALTYYDDEFAYWGPGTLVTVSA

SEQ ID NO: 1148 - protein, 119 aa, Artificial Sequence
  FDP-h3, 7, 11, 15 heavy chain protein
EVQLVQSGAEVKKPGATVKISCKVSGFSLFNYGVHWVRQATGQGLEWMGVIWSGGNTDYNTPFTSRFTISRDDSKNTAYLQMNSLKTEDTAVYYCARALTYYDDEFAYWGPGTLVTVSA

SEQ ID NO: 1149 - protein, 119 aa, Artificial Sequence
  FDP-h4, 8, 12, 16 heavy chain protein
QVQLQQSGPGLVKPSQTLSLTCAISGFSLFNYGVHWIRQSPSRGLEWLGVIWSGGNTDYNTPFTSRLTISKDTSKNQVVLTMTNMDPVDTATYYCARALTYYDDEFAYWGPGTLVTVSA

SEQ ID NO: 1150 - protein, 119 aa, Artificial Sequence; identical to SEQ ID NO: 1146
  FDP-h5, 9, 13, 17 heavy chain protein

SEQ ID NO: 1151 - protein, 119 aa, Artificial Sequence
  FDP-h6 heavy chain protein
EVQLVQSGAEVKKPGATVKISCKVSGFSLFNYGVHWIRQSPSRGLEWLGVIWSGGNTDYNTPFTSRFTISRDNSKNTLYLQMNSLRAEDTAVYYCARALTYYDDEFAYWGPGTLVTVSA

SEQ ID NO: 1152 - protein, 119 aa, Artificial Sequence
  FDP-h10, 14, 18 heavy chain protein
EVQLVQSGAEVKKPGATVKISCKVSGFSLFNYGVHWIRQPPGKGLEWIGVIWSGGNTDYNTPFTSRFTISRDDSKNTAYLQMNSLKTEDTAVYYCARALTYYDDEFAYWGPGTLVTVSA

SEQ ID NO: 1153 - protein, 107 aa, Artificial Sequence; identical to SEQ ID NO: 1145
  FDP-h1, 2 light chain protein

SEQ ID NO: 1154 - protein, 107 aa, Artificial Sequence; identical to SEQ ID NO: 1142
  FDP-h3, 4 light chain protein

SEQ ID NO: 1155 - protein, 107 aa, Artificial Sequence; identical to SEQ ID NO: 1144
  FDP-h5 light chain protein

SEQ ID NO: 1156 - protein, 107 aa, Artificial Sequence
  FDP-h6, 7, 7*, 8 light chain protein
EIVLTQSPATLSLSPGERATLSCRASQSIGTNIHWYQQKPGQAPRLLIYYASESISGVPSRFSGSGSGTDFTLTISSLQPEDFATYYCQQNNNWPTTFGQGTKLELK

SEQ ID NO: 1157 - protein, 107 aa, Artificial Sequence
  FDP-h9, 10, 11, 12, 20 light chain protein
AIQLTQSPSSLSASVGDRVTITCRASQSIGTNIHWYQQKPGQAPRLLIYYASESISGIPPRFSGSGSGTDFTLTISRLEPEDFAVYYCQQNNNWPTTFGQGTKLELK

SEQ ID NO: 1158 - protein, 107 aa, Artificial Sequence
  FDP-h17 light chain protein
EIVLTQSPATLSLSPGERATLSCRASQSIGTNIHWYQQKPGQAPRLLIYYASESISGIPARFSGSGSGTEFTLTISSLQSEDFAVYYCQQNNNWPTTFGQGTKLELK

SEQ ID NO: 1159 - protein, 107 aa, Artificial Sequence; identical to SEQ ID NO: 1142
  FDP-h18, h19 light chain protein

SEQ ID NO: 1160 - DNA, 357 bp, Artificial Sequence
  DP-h1, 2, 4, 5, 6, 8 heavy chain DNA
caggtacagctgcagcagtcaggtccaggactggtgaagccctcgcagaccctctcactcacctgtgccatctctggtttctcattaactaactatggtgtacactggatccgccagcccccagggaaggggctggagtggattggtgtgatatggagtggtggaaacacagactataatacacctttcacatccagattcaccatctccagagatgattcaaagaacacggcgtatctgcaaatgaacagcctgaaaaccgaggacacggccgtgtattactgtgccagagccctcacctactatgatgatgagtttgcttactggggccctggaacgctggtcaccgtcagcgca

SEQ ID NO: 1161 - DNA, 357 bp, Artificial Sequence
  DP-h3, 7 heavy chain DNA
gaggtccagctggtacagtctggggctgaggtgaagaagcctggggctacagtgaaaatctcctgcaaggtttctggtttctcattaactaactatggtgtacactgggtgcgacaggccactggacaagggcttgagtggatgggtgtgatatggagtggtggaaacacagactataatacacctttcacatccagattcaccatctccagagatgattcaaagaacacggcgtatctgcaaatgaacagcctgaaaaccgaggacacggccgtgtattactgtgccagagccctcacctactatgatgatgagtttgcttactggggccctggaacgctggtcaccgtcagcgca

SEQ ID NO: 1162 - DNA, 357 bp, Artificial Sequence
  DP-h9, 12, 14 heavy chain DNA
gaggtccagctggtacagtctggggctgaggtgaagaagcctggggctacagtgaaaatctcctgcaaggtttctggtttctcattaactaactatggtgtacactggatcaggcagtccccatcgagaggccttgagtggctgggtgtgatatggagtggtggaaatacagactataatacacctttcacatccagactcaccatctccaaggacacctccaaaaaccaggtggtccttacaatgaccaacatggaccctgtggacacagccacgtattactgtgccagagccctcacctactatgatgatgagtttgcttactggggccctggaacgctggtcaccgtcagcgca

SEQ ID NO: 1163 - DNA, 357 bp, Artificial Sequence
  DP-h10, 13 heavy chain DNA
gaggtccagctggtacagtctggggctgaggtgaagaagcctggggctacagtgaaaatctcctgcaaggtttctggtttctcattaactaactatggtgtacactggatccgccagcccccagggaaggggctggagtggattggtgtgatatggagtggtggaaacacagactataatacacctttcacatccagattcaccatctccagagacaacgccaagaactcactgtatctgcaaatgaacagcctgagagccgaggacacggctgtgtattactgtgccagagccctcacctactatgatgatgagtttgcttactggggccctggaacgctggtcaccgtcagcgca

SEQ ID NO: 1164 - DNA, 321 bp, Artificial Sequence
  DP-h1, 3 light chain DNA
gccatccagttgacccagtctccatcctccctgtctgcatctgtaggagacagagtcaccatcacttgcagggccagtcagagtattggcacaaacatacactggtaccagcagaaacctggccaggctcccaggctcctcatctattatgcttctgagtctatctctggggtcccatcaaggttcagcggcagtggatctgggacagatttcactctcaccatcagcagcctgcagcctgaagattttgcaacttattactgtcaacaaaataataactggccaaccacgttcggccaagggaccaagctggagctgaaa

SEQ ID NO: 1165 - DNA, 321 bp, Artificial Sequence
  DP-h2 light chain DNA
gccatccagttgacccagtctccatcctccctgtctgcatctgtaggagacagagtcaccatcacttgcagggccagtcagagtattggcacaaacatacactggtacctgcagaagccagggcagtctccacagctcctgatctattatgcttctgagtctatctctggggtcccatcaaggttcagcggcagtggatctgggacagatttcactctcaccatcagcagcctgcagcctgaagattttgcaacttattactgtcaacaaaataataactggccaaccacgttcggccaagggaccaagctggagctgaaa

SEQ ID NO: 1166 - DNA, 321 bp, Artificial Sequence
  DP-h4 light chain DNA
gccatccagttgacccagtctccatcctccctgtctgcatctgtaggagacagagtcaccatcacttgcagggccagtcagagtattggcacaaacatacactggtatcagcagaaaccagggaaagctcctaagctcctgatctattatgcttctgagtctatctctggggtcccatcaaggttcagcggcagtggatctgggacagatttcactctcaccatcagcagcctgcagcctgaagattttgcaacttattactgtcaacaaaataataactggccaaccacgttcggccaagggaccaagctggagctgaaa

SEQ ID NO: 1167 - DNA, 321 bp, Artificial Sequence
  DP-h5 light chain DNA
gacatccagatgacccagtctccatcctccctgtctgcatctgtaggagacagagtcaccatcacttgcagggccagtcagagtattggcacaaacatacactggtaccagcagaaacctggccaggctcccaggctcctcatctattatgcttctgagtctatctctgggatcccagacaggttcagtggcagtgggtctgggacagacttcactctcaccatcagcagactggagcctgaagattttgcagtgtattactgtcaacaaaataataactggccaaccacgttcggccaagggaccaagctggagctgaaa

SEQ ID NO: 1168 - DNA, 321 bp, Artificial Sequence
  DP-h6, 7, 9 light chain DNA
gccatccagttgacccagtctccatcctccctgtctgcatctgtaggagacagagtcaccatcacttgcagggccagtcagagtattggcacaaacatacactggtacctgcagaagccagggcagtctccacagctcctgatctattatgcttctgagtctatctctgggatcccagacaggttcagtggcagtgggtctgggacagacttcactctcaccatcagcagactggagcctgaagattttgcagtgtattactgtcaacaaaataataactggccaaccacgttcggccaagggaccaagctggagctgaaa

SEQ ID NO: 1169 - DNA, 321 bp, Artificial Sequence
  DP-h8 light chain DNA
gccatccagttgacccagtctccatcctccctgtctgcatctgtaggagacagagtcaccatcacttgcagggccagtcagagtattggcacaaacatacactggtaccagcagaaacctggccaggctcccaggctcctcatctattatgcttctgagtctatctctgggatcccagccaggttcagtggcagtgggtctgggacagagttcactctcaccatcagcagcctgcagtctgaagattttgcagtttattactgtcaacaaaataataactggccaaccacgttcggccaagggaccaagctggagctgaaa

SEQ ID NO: 1170 - DNA, 321 bp, Artificial Sequence
  DP-h10, 12 light chain DNA
gaaattgtgttgacacagtctccagccaccctgtctttgtctccaggggaaagagccaccctctcctgcagggccagtcagagtattggcacaaacatacactggtatcagcagaaaccagggaaagctcctaagctcctgatctattatgcttctgagtctatctctgggatcccagacaggttcagtggcagtgggtctgggacagacttcactctcaccatcagcagactggagcctgaagattttgcagtgtattactgtcaacaaaataataactggccaaccacgttcggccaagggaccaagctggagctgaaa

SEQ ID NO: 1171 - DNA, 321 bp, Artificial Sequence
  DP-h13, 14 light chain DNA
gaaattgtgttgacacagtctccagccaccctgtctttgtctccaggggaaagagccaccctctcctgcagggccagtcagagtattggcacaaacatacactggtaccagcagaaacctggccaggctcccaggctcctcatctattatgcttctgagtctatctctggggtcccatcaaggttcagcggcagtggatctgggacagaattcactctcaccatcagcagcctgcagcctgatgattttgcaacttattactgtcaacaaaataataactggccaaccacgttcggccaagggaccaagctggagctgaaa

SEQ ID NO: 1172 - DNA, 357 bp, Artificial Sequence
  FDP-h1, 7*, 19, 20, 21 heavy chain DNA
gaggtccagctggtacagtctggggctgaggtgaagaagcctggggctacagtgaaaatctcctgcaaggtttctggtttctcattatttaactatggtgtacactggatccgccagcccccagggaaggggctggagtggattggtgtgatatggagtggtggaaacacagactataatacacctttcacatccagattcaccatctccagagacaattccaagaacacgctgtatcttcaaatgaacagcctgagagccgaggacacggccgtgtattactgtgccagagccctcacctactatgatgatgagtttgcttactggggccctggaacgctggtcaccgtcagcgca

SEQ ID NO: 1173 - DNA, 357 bp, Artificial Sequence
  FDP-h2 heavy chain DNA
gaggtccagctggtacagtctggggctgaggtgaagaagcctggggctacagtgaaaatctcctgcaaggtttctggtttctcattatttaactatggtgtacactgggtgcgacaggctcgtggacaacgccttgagtggataggtgtgatatggagtggtggaaacacagactataatacacctttcacatccagattcaccatctccagagatgattcaaagaacacggcgtatctgcaaatgaacagcctgaaaaccgaggacacggccgtgtattactgtgccagagccctcacctactatgatgatgagtttgcttactggggccctggaacgctggtcaccgtcagcgca

SEQ ID NO: 1174 - DNA, 357 bp, Artificial Sequence
  FDP-h3, 7, 11, 15 heavy chain DNA
gaggtccagctggtacagtctggggctgaggtgaagaagcctggggctacagtgaaaatctcctgcaaggtttctggtttctcattatttaactatggtgtacactgggtgcgacaggccactggacaagggcttgagtggatgggtgtgatatggagtggtggaaacacagactataatacacctttcacatccagattcaccatctccagagatgattcaaagaacacggcgtatctgcaaatgaacagcctgaaaaccgaggacacggccgtgtattactgtgccagagccctcacctactatgatgatgagtttgcttactggggccctggaacgctggtcaccgtcagcgca

SEQ ID NO: 1175 - DNA, 357 bp, Artificial Sequence
  FDP-h4, 8, 12, 16 heavy chain DNA
caggtacagctgcagcagtcaggtccaggactggtgaagccctcgcagaccctctcactcacctgtgccatctctggtttctcattatttaactatggtgtacactggatcaggcagtccccatcgagaggccttgagtggctgggtgtgatatggagtggtggaaacacagactataatacacctttcacatccagactcaccatctccaaggacacctccaaaaaccaggtggtccttacaatgaccaacatggaccctgtggacacagccacgtattactgtgccagagccctcacctactatgatgatgagtttgcttactggggccctggaacgctggtcaccgtcagcgca

SEQ ID NO: 1176 - DNA, 357 bp, Artificial Sequence
  FDP-h5, 9, 13, 17 heavy chain DNA
gaggtccagctggtacagtctggggctgaggtgaagaagcctggggctacagtgaaaatctcctgcaaggtttctggtttttcattatttaactatggtgtacactggatccgccagcccccagggaaggggctggagtggattggtgtgatatggagtggtggaaacacagactataatacacctttcacatccagattcaccatctccagagacaattccaagaacacgctgtatcttcaaatgaacagcctgagagccgaggacacggccgtgtattactgtgccagagccctcacctactatgatgatgagtttgcttactggggccctggaacgctggtcaccgtcagcgca

SEQ ID NO: 1177 - DNA, 357 bp, Artificial Sequence
  FDP-h6 heavy chain DNA
gaggtccagctggtacagtctggggctgaggtgaagaagcctggggctacagtgaaaatctcctgcaaggtttctggtttctcattatttaactatggtgtacactggatcaggcagtccccatcgagaggccttgagtggctgggtgtgatatggagtggtggaaacacagactataatacacctttcacatccagattcaccatctccagagacaattccaagaacacgctgtatcttcaaatgaacagcctgagagccgaggacacggccgtgtattactgtgccagagccctcacctactatgatgatgagtttgcttactggggccctggaacgctggtcaccgtcagcgca

SEQ ID NO: 1178 - DNA, 357 bp, Artificial Sequence
  FDP-h10, 14, 18 heavy chain DNA
gaggtccagctggtacagtctggggctgaggtgaagaagcctggggctacagtgaaaatctcctgcaaggtttctggtttctcattatttaactatggtgtacactggatccgccagcccccagggaaggggctggagtggattggtgtgatatggagtggtggaaacacagactataatacacctttcacatccagattcaccatctccagagatgattcaaagaacacggcgtatctgcaaatgaacagcctgaaaaccgaggacacggccgtgtattactgtgccagagccctcacctactatgatgatgagtttgcttactggggccctggaacgctggtcaccgtcagcgca

SEQ ID NO: 1179 - DNA, 321 bp, Artificial Sequence; identical to SEQ ID NO: 1171
  FDP-h1, 2 light chain DNA

SEQ ID NO: 1180 - DNA, 321 bp, Artificial Sequence; identical to SEQ ID NO: 1168
  FDP-h3, 4 light chain DNA

SEQ ID NO: 1181 - DNA, 321 bp, Artificial Sequence; identical to SEQ ID NO: 1170
  FDP-h5 light chain DNA

SEQ ID NO: 1182 - DNA, 321 bp, Artificial Sequence
  FDP-h6, 7, 7*, 8 light chain DNA
gaaattgtgttgacacagtctccagccaccctgtctttgtctccaggggaaagagccaccctctcctgcagggccagtcagagtattggcacaaacatacactggtaccagcagaaacctggccaggctcccaggctcctcatctattatgcttctgagtctatctctggggtcccatcaaggttcagcggcagtggatctgggacagatttcactctcaccatcagcagcctgcagcctgaagattttgcaacttattactgtcaacaaaataataactggccaaccacgttcggccaagggaccaagctggagctgaaa

SEQ ID NO: 1183 - DNA, 321 bp, Artificial Sequence
  FDP-h9, 10, 11, 12, 20 light chain DNA
gccatccagttgacccagtctccatcctccctgtctgcatctgtaggagacagagtcaccatcacttgcagggccagtcagagtattggcacaaacatacactggtaccagcagaaacctggccaggctcccaggctcctcatctattatgcttctgagtctatctctgggatcccacctcgattcagtggcagcgggtctgggacagacttcactctcaccatcagcagactggagcctgaagattttgcagtgtattactgtcaacaaaataataactggccaaccacgttcggccaagggaccaagctggagctgaaa

SEQ ID NO: 1184 - DNA, 321 bp, Artificial Sequence
  FDP-h17 light chain DNA
gaaattgtgttgacacagtctccagccaccctgtctttgtctccaggggaaagagccaccctctcctgcagggccagtcagagtattggcacaaacatacactggtaccagcagaaacctggccaggctcccaggctcctcatctattatgcttctgagtctatctctgggatcccagccaggttcagtggcagtgggtctgggacagagttcactctcaccatcagcagcctgcagtctgaagattttgcagtttattactgtcaacaaaataataactggccaaccacgttcggccaagggaccaagctggagctgaaa

SEQ ID NO: 1185 - DNA, 321 bp, Artificial Sequence; identical to SEQ ID NO: 1168
  FDP-h18, h19 light chain DNA

SEQ ID NO: 1186 - protein, 107 aa, Artificial Sequence
  FDP-h13, 14, 15, 16, 21 light chain protein
AIQLTQSPSSLSASVGDRVTITCRASQSIGTNIHWYQQKPGQAPRLLIYYASESISGIPDRFSGSGSGTDFTLTISRLEPEDFAVYYCQQNNNWPTTFGQGTKLELK

SEQ ID NO: 1187 - DNA, 321 bp, Artificial Sequence
  FDP-h13, 14, 15, 16, 21 light chain DNA
gccatccagttgacccagtctccatcctccctgtctgcatctgtaggagacagagtcaccatcacttgcagggccagtcagagtattggcacaaacatacactggtaccagcagaaacctggccaggctcccaggctcctcatctattatgcttctgagtctatctctgggatcccagacaggttcagtggcagtgggtctgggacagacttcactctcaccatcagcagactggagcctgaagattttgcagtgtattactgtcaacaaaataataactggccaaccacgttcggccaagggaccaagctggagctgaaa

SEQ ID NO: 1188 - protein, 446 aa, Artificial Sequence
  EU IgG1 heavy chain
  VARIANT (1)...(1): Xaa = Pca (pyroglutamic acid)
XVQLVQSGAEVKKPGSSVKVSCKASGGTFSRSAIIWVRQAPGQGLEWMGGIVPMFGPPNYAQKFQGRVTITADESTNTAYMELSSLRSEDTAFYFCAGGYGIYSPEEYNGGLVTVSSASTKGPSVFPLAPSSKSTSGGTAALGCLVKDYFPEPVTVSWNSGALTSGVHTFPAVLQSSGLYSLSSVVTVPSSSLGTQTYICNVNHKPSNTKVDKRVEPKSCDKTHTCPPCPAPELLGGPSVFLFPPKPKDTLMISRTPEVTCVVVDVSHEDPQVKFNWYVDGVQVHNAKTKPREQQYNSTYRVVSVLTVLHQNWLDGKEYKCKVSNKALPAPIEKTISKAKGQPREPQVYTLPPSREEMTKNQVSLTCLVKGFYPSDIAVEWESNDGEPENYKTTPPVLDSDGSFFLYSKLTVDKSRWQEGNVFSCSVMHEALHNHYTQKSLSLSPG

SEQ ID NO: 1189 - protein, 214 aa, Artificial Sequence
  EU IgG1 light chain
DIQMTQSPSTLSASVGDRVTITCRASQSINTWLAWYQQKPGKAPKLLMYKASSLESGVPSRFIGSGSGTEFTLTISSLQPDDFATYYCQQYNSDSKMFGQGTKVEVKGTVAAPSVFIFPPSDEQLKSGTASVVCLLNNFYPREAKVQWKVDNALQSGNSQESVTEQDSKDSTYSLSSTLTLSKADYEKHKVYACEVTHQGLSSPVTKSFNRGEC

SEQ ID NO: 1190 - protein, 24 aa, Artificial Sequence
  Modified Pseudomonas endotoxin sorting signal (Xaa-Asp-Glu-Leu)n, where n = 1-6
  REPEAT (1)...(4): occurring 1, 2, 3, 4, 5, or 6 times
  VARIANT (1)...(1): Xaa = Lys or Arg
  VARIANT (5)...(5): Xaa = Lys or Arg
  VARIANT (9)...(9): Xaa = Lys or Arg
  VARIANT (13)...(13): Xaa = Lys or Arg
  VARIANT (17)...(17): Xaa = Lys or Arg
  VARIANT (21)...(21): Xaa = Lys or Arg
  VARIANT (5)...(24): these amino acids can be present or absent
XDELXDELXDELXDELXDELXDEL

SEQ ID NO: 1191 - protein, 98 aa, Homo sapiens
  Immunoglobulin heavy chain variable region V-segment IGHV3-33*01  IGMT acc. AB019439
QVQLVESGGGVVQPGRSLRLSCAASGFTFSSYGMHWVRQAPGKGLEWVAVIWYDGSNKYYADSVKGRFTISRDNSKNTLYLQMNSLRAEDTAVYYCAR

SEQ ID NO: 1192 - protein, 98 aa, Homo sapiens
  Immunoglobulin heavy chain variable region V-segment IGHV1-3*01  IGMT acc. X62109
QVQLVQSGAEVKKPGASVKVSCKASGYTFTSYAMHWVRQAPGQRLEWMGWINAGNGNTKYSQKFQGRVTITRDTSASTAYMELSSLRSEDTAVYYCAR

SEQ ID NO: 1193 - protein, 98 aa, Homo sapiens
  IImmunoglobulin heavy chain variable region V-segment IGHV1-46*03  IGMT acc. L06612
QVQLVQSGAEVKKPGASVKVSCKASGYTFTSYYMHWVRQAPGQGLEWMGIINPSGGSTSYAQKFQGRVTMTRDTSTSTVYMELSSLRSEDTAVYYCAR

SEQ ID NO: 1194 - protein, 98 aa, Homo sapiens
  Immunoglobulin heavy chain variable region V-segment IGHV3-NL1*01  IGMT acc. HM855939
QVQLVESGGGVVQPGGSLRLSCAASGFTFSSYGMHWVRQAPGKGLEWVSVIYSGGSSTYYADSVKGRFTISRDNSKNTLYLQMNSLRAEDTAVYYCAK

SEQ ID NO: 1195 - protein, 100 aa, Homo sapiens
  IImmunoglobulin heavy chain variable region V-segment IGHV2-26*01  IGMT acc. M99648
QVTLKESGPVLVKPTETLTLTCTVSGFSLSNARMGVSWIRQPPGKALEWLAHIFSNDEKSYSTSLKSRLTISKDTSKSQVVLTMTNMDPVDTATYYCARI

SEQ ID NO: 1196 - protein, 100 aa, Homo sapiens
  Immunoglobulin heavy chain variable region V-segment IGHV3-15*07 IGMT acc. M99406
EVQLVESGGGLVKPGGSLRLSCAASGFTFSNAWMNWVRQAPGKGLEWVGRIKSKTDGGTTDYAAPVKGRFTISRDDSKNTLYLQMNSLKTEDTAVYYCTT

SEQ ID NO: 1197 - protein, 95 aa, Homo sapiens
  Immunoglobulin light chain variable region kappa V-segment IGKV1D-13*01 IGMT acc. X17262
AIQLTQSPSSLSASVGDRVTITCRASQGISSALAWYQQKPGKAPKLLIYDASSLESGVPSRFSGSGSGTDFTLTISSLQPEDFATYYCQQFNNYP

SEQ ID NO: 1198 - protein, 95 aa, Homo sapiens
  Immunoglobulin light chain variable region kappa V-segment IGKV1-39*01 IGMT acc. X59315
DIQMTQSPSSLSASVGDRVTITCRASQSISSYLNWYQQKPGKAPKLLIYAASSLQSGVPSRFSGSGSGTDFTLTISSLQPEDFATYYCQQSYSTP

SEQ ID NO: 1199 - protein, 95 aa, Homo sapiens
  Immunoglobulin light chain variable region kappa V-segment IGKV3-11*01 IGMT acc. X01668
EIVLTQSPATLSLSPGERATLSCRASQSVSSYLAWYQQKPGQAPRLLIYDASNRATGIPARFSGSGSGTDFTLTISSLEPEDFAVYYCQQRSNWP

SEQ ID NO: 1200 - protein, 95 aa, Homo sapiens
  Immunoglobulin light chain variable region kappa V-segment IGKV3-15*01 IGMT acc. M23090
EIVMTQSPATLSVSPGERATLSCRASQSVSSNLAWYQQKPGQAPRLLIYGASTRATGIPARFSGSGSGTEFTLTISSLQSEDFAVYYCQQYNNWP

SEQ ID NO: 1201 - protein, 4 aa, Artificial Sequence
  Ala-Leu-Ala-Ala Peptide linker
ALAA

SEQ ID NO: 1202 - protein, 245 aa, Artificial Sequence
  Bryodin
DVSFRLSGATTTSYGVFIKNLREALPYERKVYNIPLLRSSISGRYTLLHLTNYADETISVAVDVTNVYIMGYLAGDVSYFFNEASATEAAKFVFKDAKKKVTLPYSGNYERLQTAAGKIRENIPLGLPALDSAITTLYYYTASSAASALLVLIQSTAESARYKFIEQQIGKRVDKTFLPSLATISLENNWSALSKQIQIASTNNGQFESPVVLIDGNNQRVSITNASARVVTSNIALLLNRNNIA

SEQ ID NO: 1203 - protein, 274 aa, Artificial Sequence
  Saporin-6
VTSITLDLVNPTAGQYSSFVDKIRNNVKDPNLKYGGTDIAVIPPSKEKFLRINFQSSRGTVSLGLKRDNLYVVAYLAMDNTNVNRAYYFRSEITSAESTALFPEATTANQKALEYTEDYQSIEKNAQITQGDQSRKELGLGIDLLSTSMEAVNKKARVVKDEARFLLIAIQMTAEAARFRYIQNLVIKNFPNKFNSENKVIQFEVNWKKISTAIYGDAKNGVFNKDYDFGFGKVRQVKDLQMGLLMYLGKPKSSNEANSTVRHYGPLKPTLLIT

SEQ ID NO: 1204 - protein, 250 aa, Artificial Sequence
  Anti-Viral Protein MAP
APTLETIASLDLNNPTTYLSFITNIRTKVADKTEQCTIQKISKTFTQRYSYIDLIVSSTQKITLAIDMADLYVLGYSDIANNKGRAFFFKDVTEAVANNFFPGATGTNRIKLTFTGSYGDLEKNGGLRKDNPLGIFRLENSIVNIYGKAGDVKKQAKFFLLAIQMVSEAARFKYISDKIPSEKYEEVTVDEYMTALENNWAKLSTAVYNSKPSTTTATKCQLATSPVTISPWIFKTVEEIKLVMGLLKSS

SEQ ID NO: 1205 - protein, 293 aa, Artificial Sequence
  Shiga Toxin A-Chain
KEFTLDFSTAKTYVDSLNVIRSAIGTPLQTISSGGTSLLMIDSGTGDNLFAVDVRGIDPEEGRFNNLRLIVERNNLYVTGFVNRTNNVFYRFADFSHVTFPGTTAVTLSGDSSYTTLQRVAGISRTGMQINRHSLTTSYLDLMSHSGTSLTQSVARAMLRFVTVTAEALRFRQIQRGFRTTLDDLSGRSYVMTAEDVDLTLNWGRLSSVLPDYHGQDSVRVGRISFGSINAILGSVALILNCHHHASRVARMASDEFPSMCPADGRVRGITHNKILWDSSTLGAILMRRTISS

SEQ ID NO: 1206 - protein, 319 aa, Artificial Sequence
  Shiga-Like Toxin Subunit A(Verotoxin 2)
MKCILFKWVLCLLLGFSSVSYSREFTIDFSTQQSYVSSLNSIRTEISTPLEHISQGTTSVSVINHTPPGSYFAVDIRGLDVYQARFDHLRLIIEQNNLYVAGFVNTATNTFYRFSDFTHISVPGVTTVSMTTDSSYTTLQRVAALERSGMQISRHSLVSSYLALMEFSGNTMTRDASRAVLRFVTVTAEALRFRQIQREFRQALSETAPVYTMTPGDVDLTLNWGRISNVLPEYRGEDGVRVGRISFNNISAILGTVAVILNCHHQGARSVRAVNEESQPECQITGDRPVIKINNTLWESNTAAAFLNRKSQFLYTTGK

SEQ ID NO: 1207 - protein, 247 aa, Artificial Sequence
  Trichosanthin
DVSFRLSGATSSSYGVFISNLRKALPNERKLYDIPLLRSSLPGSQRYALIHLTNYADETISVAIDVTNVYIMGYRAGDTSYFFNEASATEAAKYVFKDAMRKVTLPYSGNYERLQTAAGKIRENIPLGLPALDSAITTLFYYNANSAASALMVLIQSTSEAARYKFIEQQIGKRVDKTFLPSLAIISLENSWSALSKQIQIASTNNGQFESPVVLINAQNQRVTITNVDAGVVTSNIALLLNRNNMA

1. An anti-EGFR antibody, or antigen-binding fragment thereof, wherein:
the anti-EGFR antibody, or antigen-binding fragment thereof, exhibits a ratio of binding activity to human epidermal growth factor receptor (EGFR) or a soluble fragment thereof under conditions in a tumor environment compared to under conditions in a non-tumor environment of at least 3.0;
conditions in a tumor environment comprise one or both of pH between or about between 5.6 to 6.8 or lactate concentration between or about between 5 mM to 20 mM, and protein concentration of 10 mg/mL to 50 mg/mL;
conditions in a non-tumor environment comprise one or both of pH between or about between 7.0 to 7.8 or lactate concentration between or about between 0.5 mM to 5 mM, and protein concentration of 10 mg/mL to 50 mg/mL, whereby the anti-EGFR antibody or fragment thereof is conditionally active under conditions in a tumor microenvironment.

2. The anti-EGFR antibody, or antigen-binding fragment thereof, of claim 1, wherein the conditions comprise a pH of between or about between 5.6 to 6.8 in the tumor environment compared to conditions that comprise a pH of between or about between 7.0 to 7.8 in the non-tumor environment.

3. The anti-EGFR antibody, or antigen-binding fragment thereof, of claim 1, wherein the conditions comprise a pH of between or about between 6.0 to 6.5 in the tumor environment compared to conditions that comprise a pH of about 7.4 in then non-tumor environment.

4. The anti-EGFR antibody, or antigen-binding fragment thereof, of claim 1, wherein the conditions comprise lactate concentration between or about between 5 mM to 20 mM in the tumor environment compared to conditions that comprise lactate concentration between or about between 0.5 mM to 5 mM in the non-tumor environment.

5. The anti-EGFR antibody, or antigen-binding fragment thereof, of claim 3, wherein the conditions comprise lactate concentration between or about between 5 mM to 20 mM in the tumor environment compared to conditions that comprise lactate concentration between or about between 0.5 mM to 5 mM in the non-tumor environment.

6. The anti-EGFR antibody, or antigen-binding fragment thereof, of claim 1, wherein:
the protein concentration is about the same in each environment; and
the protein concentration is at least 12 mg/mL, 15 mg/mL, 20 mg/mL, 25 mg/mL, 30 mg/mL, 35 mg/mL, 40 mg/mL, 45 mg/mL or 50 mg/mL.

7. The anti-EGFR antibody, or antigen-binding fragment thereof, of claim 6, wherein the protein is serum albumin.

8. The anti-EGFR antibody, or antigen-binding fragment thereof, of claim 7, wherein the protein is human serum albumin.

9. The anti-EGFR antibody, or antigen-binding fragment thereof, of claim 8, wherein:
the protein is provided in serum; and
the concentration of serum is 20% (vol/vol) to 90% (vol/vol), 20% (vol/vol) to 50% (vol/vol) or 20% (vol/vol) to 40% (vol/vol) or about 25% (vol/vol).

10. The anti-EGFR antibody, or antigen-binding fragment thereof, of claim 1, wherein:
the binding activity is assessed in vitro in a solid-phase binding assay;
the ratio is a spectrophotometric measurement for binding under conditions in the tumor-microenvironment compared to under conditions in a non-tumor microenvironment; and
the concentration of antibody is the same in both environments.

11. The anti-EGFR antibody, or antigen-binding fragment thereof, of claim 10, wherein the concentration of antibody is between or about between 1 ng/mL to 100 ng/mL.

12. The anti-EGFR antibody, or antigen-binding fragment thereof, of claim 1, wherein:
the binding activity is the dissociation constant (K_{D}) as determined using a biosensor, and the antibody, or antigen-binding fragment thereof, exhibits a ratio of at least 3 if there is at least 3-fold tighter affinity under conditions in the tumor-microenvironment compared to under conditions in a non-tumor microenvironment; or
the binding activity is the off-rate as determined using a biosensor, and the antibody, or antigen-binding fragment thereof, exhibits a ratio of at least 3 if the off-rate is at least 3 times slower under conditions that exist in a tumor microenvironment compared to under conditions that exist under a non-tumor microenvironment.

13. The anti-EGFR antibody, or antigen-binding fragment thereof, of claim 1, wherein binding activity is assessed in vivo in a subject in a tumor microenvironment expressing EGFR and/or in a non-tumor microenvironment expressing EGFR.

14. The anti-EGFR antibody, or antigen-binding fragment thereof, of claim 13, wherein the non-tumor microenvironment is the basal layer of the skin expressing human EGFR.

15. The anti-EGFR antibody, or antigen-binding fragment thereof, of claim 14, wherein:
the subject is a non-human animal;
the tumor microenvironment comprises a human tumor xenograft expressing human EGFR; and
the non-tumor microenvironment comprises a human skin xenograft expressing human EGFR.

16. The anti-EGFR antibody, or antigen-binding fragment thereof, of claim 1, wherein the ratio of activity is at least 3.5, 4, 5, 6, 7, 8, 9, 10, 11, 12, 13, 14, 15, 16, 17, 18, 19, 20, 25, 30, 35, 40, 45, 50, 55, 60 or more.

17. The anti-EGFR antibody, or antigen-binding fragment thereof, of claim 1, wherein:
the V_{H} region of the variable heavy chain exhibits at least 56% sequence identity to its closest human V_{H} gene segment germline sequence; and
the V_{L} region of the light chain exhibits at least 75% sequence identity to its closest human V_{L} gene segment germline sequence.

18. The anti-EGFR antibody, or antigen-binding fragment thereof, of claim 1, comprising:
a) a variable heavy (VH) chain comprising the sequence of amino acids set forth in SEQ ID NO:495, 1062, 1112, 1114-1118, 1124-1126, 1128-1130, 1134-1137, or 1146-1152, or a sequence of amino acids that exhibits at least 85% sequence identity to any of SEQ ID NOS: 495, 1062, 1112, 1114-1118, 1124-1126, 1128-1130, 1134-1137, or 1146-1152; and
b) a variable light (VL) chain comprising the sequence of amino acids set forth in SEQ ID NO:4, 10, 1138-1145, 1153-1159 or 1186, or a sequence of amino acids that exhibits at least 85% sequence identity to SEQ ID NO:4, 10, 1138-1145, 1153-1159 or 1186.

19. The anti-EGFR antibody, or antigen-binding fragment thereof, of claim 1 selected from among an antibody comprising:
a) the variable heavy chain set forth in SEQ ID NO:495 or a sequence of amino acids that exhibits at least 85% sequence identity to SEQ ID NO:495, and the variable light chain set forth in SEQ ID NO:4 or 10 or a sequence of amino acids that exhibits at least 85% sequence identity to SEQ ID NO:4 or 10;
b) the variable heavy chain set forth in SEQ ID NO:1062 or a sequence of amino acids that exhibits at least 85% sequence identity to SEQ ID NO:1062, and the variable light chain set forth in SEQ ID NO:4 or 10 or a sequence of amino acids that exhibits at least 85% sequence identity to SEQ ID NO:4 or 10;
c) the variable heavy chain set forth in SEQ ID NO:1112 or a sequence of amino acids that exhibits at least 85% sequence identity to SEQ ID NO:1112, and the variable light chain set forth in SEQ ID NO:4 or 10 or a sequence of amino acids that exhibits at least 85% sequence identity to SEQ ID NO:4 or 10;
d) the variable heavy chain set forth in SEQ ID NO:1114 or a sequence of amino acids that exhibits at least 85% sequence identity to SEQ ID NO:1114, and the variable light chain set forth in SEQ ID NO:4 or 10 or a sequence of amino acids that exhibits at least 85% sequence identity to SEQ ID NO:4 or 10;
e) the variable heavy chain set forth in SEQ ID NO:1115 or a sequence of amino acids that exhibits at least 85% sequence identity to SEQ ID NO:1115, and the variable light chain set forth in SEQ ID NO:4 or 10 or a sequence of amino acids that exhibits at least 85% sequence identity to SEQ ID NO:4 or 10;
f) the variable heavy chain set forth in SEQ ID NO:1116 or a sequence of amino acids that exhibits at least 85% sequence identity to SEQ ID NO:1116, and the variable light chain set forth in SEQ ID NO:4 or 10 or a sequence of amino acids that exhibits at least 85% sequence identity to SEQ ID NO:4 or 10;
g) the variable heavy chain set forth in SEQ ID NO:1117 or a sequence of amino acids that exhibits at least 85% sequence identity to SEQ ID NO:1117, and the variable light chain set forth in SEQ ID NO:4 or 10 or a sequence of amino acids that exhibits at least 85% sequence identity to SEQ ID NO:4 or 10;
h) the variable heavy chain set forth in SEQ ID NO:1124 or a sequence of amino acids that exhibits at least 85% sequence identity to SEQ ID NO:1124, and the variable light chain set forth in SEQ ID NO:4 or 10 or a sequence of amino acids that exhibits at least 85% sequence identity to SEQ ID NO:4 or 10;
i) the variable heavy chain set forth in SEQ ID NO:1125 or a sequence of amino acids that exhibits at least 85% sequence identity to SEQ ID NO:1125, and the variable light chain set forth in SEQ ID NO:4 or 10 or a sequence of amino acids that exhibits at least 85% sequence identity to SEQ ID NO:4 or 10;
j) the variable heavy chain set forth in SEQ ID NO:1126 or a sequence of amino acids that exhibits at least 85% sequence identity to SEQ ID NO:1126, and the variable light chain set forth in SEQ ID NO:4 or 10 or a sequence of amino acids that exhibits at least 85% sequence identity to SEQ ID NO:4 or 10;
k) the variable heavy chain set forth in SEQ ID NO:1128 or a sequence of amino acids that exhibits at least 85% sequence identity to SEQ ID NO:1128, and the variable light chain set forth in SEQ ID NO:4 or 10 or a sequence of amino acids that exhibits at least 85% sequence identity to SEQ ID NO:4 or 10;
l) the variable heavy chain set forth in SEQ ID NO:1129 or a sequence of amino acids that exhibits at least 85% sequence identity to SEQ ID NO:1129, and the variable light chain set forth in SEQ ID NO:4 or 10 or a sequence of amino acids that exhibits at least 85% sequence identity to SEQ ID NO:4 or 10;
m) the variable heavy chain set forth in SEQ ID NO:1130 or a sequence of amino acids that exhibits at least 85% sequence identity to SEQ ID NO:1130, and the variable light chain set forth in SEQ ID NO:4 or 10 or a sequence of amino acids that exhibits at least 85% sequence identity to SEQ ID NO:4 or 10;
n) the variable heavy chain set forth in SEQ ID NO:1134 or a sequence of amino acids that exhibits at least 85% sequence identity to SEQ ID NO:1134, and the variable light chain set forth in SEQ ID NO:1138 or a sequence of amino acids that exhibits at least 85% sequence identity to SEQ ID NO:1138;
o) the variable heavy chain set forth in SEQ ID NO:1134 or a sequence of amino acids that exhibits at least 85% sequence identity to SEQ ID NO:1134, and the variable light chain set forth in SEQ ID NO:1139 or a sequence of amino acids that exhibits at least 85% sequence identity to SEQ ID NO:1139;
p) the variable heavy chain set forth in SEQ ID NO:1135 or a sequence of amino acids that exhibits at least 85% sequence identity to SEQ ID NO:1135, and the variable light chain set forth in SEQ ID NO:1138 or a sequence of amino acids that exhibits at least 85% sequence identity to SEQ ID NO:1138;
q) the variable heavy chain set forth in SEQ ID NO:1134 or a sequence of amino acids that exhibits at least 85% sequence identity to SEQ ID NO:1134, and the variable light chain set forth in SEQ ID NO:1140 or a sequence of amino acids that exhibits at least 85% sequence identity to SEQ ID NO:1140;
r) the variable heavy chain set forth in SEQ ID NO:1134 or a sequence of amino acids that exhibits at least 85% sequence identity to SEQ ID NO:1134, and the variable light chain set forth in SEQ ID NO:1141 or a sequence of amino acids that exhibits at least 85% sequence identity to SEQ ID NO:1141;
s) the variable heavy chain set forth in SEQ ID NO:1134 or a sequence of amino acids that exhibits at least 85% sequence identity to SEQ ID NO:1134, and the variable light chain set forth in SEQ ID NO:1142 or a sequence of amino acids that exhibits at least 85% sequence identity to SEQ ID NO:1142;
t) the variable heavy chain set forth in SEQ ID NO:1135 or a sequence of amino acids that exhibits at least 85% sequence identity to SEQ ID NO:1135, and the variable light chain set forth in SEQ ID NO:1142 or a sequence of amino acids that exhibits at least 85% sequence identity to SEQ ID NO:1142;
u) the variable heavy chain set forth in SEQ ID NO:1134 or a sequence of amino acids that exhibits at least 85% sequence identity to SEQ ID NO:1134, and the variable light chain set forth in SEQ ID NO:1143 or a sequence of amino acids that exhibits at least 85% sequence identity to SEQ ID NO:1143;
v) the variable heavy chain set forth in SEQ ID NO:1136 or a sequence of amino acids that exhibits at least 85% sequence identity to SEQ ID NO:1136, and the variable light chain set forth in SEQ ID NO:1142 or a sequence of amino acids that exhibits at least 85% sequence identity to SEQ ID NO:1142;
w) the variable heavy chain set forth in SEQ ID NO:1137 or a sequence of amino acids that exhibits at least 85% sequence identity to SEQ ID NO:1137, and the variable light chain set forth in SEQ ID NO:1144 or a sequence of amino acids that exhibits at least 85% sequence identity to SEQ ID NO:1144;
x) the variable heavy chain set forth in SEQ ID NO:1136 or a sequence of amino acids that exhibits at least 85% sequence identity to SEQ ID NO:1136, and the variable light chain set forth in SEQ ID NO:1144 or a sequence of amino acids that exhibits at least 85% sequence identity to SEQ ID NO:1144;
y) the variable heavy chain set forth in SEQ ID NO:1137 or a sequence of amino acids that exhibits at least 85% sequence identity to SEQ ID NO:1137, and the variable light chain set forth in SEQ ID NO:1145 or a sequence of amino acids that exhibits at least 85% sequence identity to SEQ ID NO:1145;
z) the variable heavy chain set forth in SEQ ID NO:1136 or a sequence of amino acids that exhibits at least 85% sequence identity to SEQ ID NO:1136, and the variable light chain set forth in SEQ ID NO:1145 or a sequence of amino acids that exhibits at least 85% sequence identity to SEQ ID NO:1145;
aa) the variable heavy chain set forth in SEQ ID NO:1146 or a sequence of amino acids that exhibits at least 85% sequence identity to SEQ ID NO:1146, and the variable light chain set forth in SEQ ID NO:1153 or a sequence of amino acids that exhibits at least 85% sequence identity to SEQ ID NO:1153;
bb) the variable heavy chain set forth in SEQ ID NO:1147 or a sequence of amino acids that exhibits at least 85% sequence identity to SEQ ID NO:1147, and the variable light chain set forth in SEQ ID NO:1153 or a sequence of amino acids that exhibits at least 85% sequence identity to SEQ ID NO:1153;
cc) the variable heavy chain set forth in SEQ ID NO:1148 or a sequence of amino acids that exhibits at least 85% sequence identity to SEQ ID NO:1148, and the variable light chain set forth in SEQ ID NO:1154 or a sequence of amino acids that exhibits at least 85% sequence identity to SEQ ID NO:1154;
dd) the variable heavy chain set forth in SEQ ID NO:1149 or a sequence of amino acids that exhibits at least 85% sequence identity to SEQ ID NO:1149, and the variable light chain set forth in SEQ ID NO:1154 or a sequence of amino acids that exhibits at least 85% sequence identity to SEQ ID NO:1154;
ee) the variable heavy chain set forth in SEQ ID NO:1150 or a sequence of amino acids that exhibits at least 85% sequence identity to SEQ ID NO:1150, and the variable light chain set forth in SEQ ID NO:1155 or a sequence of amino acids that exhibits at least 85% sequence identity to SEQ ID NO:1155;
ff) the variable heavy chain set forth in SEQ ID NO:1151 or a sequence of amino acids that exhibits at least 85% sequence identity to SEQ ID NO:1151, and the variable light chain set forth in SEQ ID NO:1156 or a sequence of amino acids that exhibits at least 85% sequence identity to SEQ ID NO:1156;
gg) the variable heavy chain set forth in SEQ ID NO:1146 or a sequence of amino acids that exhibits at least 85% sequence identity to SEQ ID NO:1146, and the variable light chain set forth in SEQ ID NO:1156 or a sequence of amino acids that exhibits at least 85% sequence identity to SEQ ID NO:1156;
hh) the variable heavy chain set forth in SEQ ID NO:1149 or a sequence of amino acids that exhibits at least 85% sequence identity to SEQ ID NO:1149, and the variable light chain set forth in SEQ ID NO:1156 or a sequence of amino acids that exhibits at least 85% sequence identity to SEQ ID NO:1156;
ii) the variable heavy chain set forth in SEQ ID NO:1150 or a sequence of amino acids that exhibits at least 85% sequence identity to SEQ ID NO:1150, and the variable light chain set forth in SEQ ID NO:1157 or a sequence of amino acids that exhibits at least 85% sequence identity to SEQ ID NO:1157;
jj) the variable heavy chain set forth in SEQ ID NO:1152 or a sequence of amino acids that exhibits at least 85% sequence identity to SEQ ID NO:1152, and the variable light chain set forth in SEQ ID NO:1157 or a sequence of amino acids that exhibits at least 85% sequence identity to SEQ ID NO:1157;
kk) the variable heavy chain set forth in SEQ ID NO:1148 or a sequence of amino acids that exhibits at least 85% sequence identity to SEQ ID NO:1148, and the variable light chain set forth in SEQ ID NO:1157 or a sequence of amino acids that exhibits at least 85% sequence identity to SEQ ID NO:1157;
ll) the variable heavy chain set forth in SEQ ID NO:1149 or a sequence of amino acids that exhibits at least 85% sequence identity to SEQ ID NO:1149, and the variable light chain set forth in SEQ ID NO:1157 or a sequence of amino acids that exhibits at least 85% sequence identity to SEQ ID NO:1157;
mm) the variable heavy chain set forth in SEQ ID NO:1150 or a sequence of amino acids that exhibits at least 85% sequence identity to SEQ ID NO:1150, and the variable light chain set forth in SEQ ID NO:1186 or a sequence of amino acids that exhibits at least 85% sequence identity to SEQ ID NO:1186;
nn) the variable heavy chain set forth in SEQ ID NO:1152 or a sequence of amino acids that exhibits at least 85% sequence identity to SEQ ID NO:1152, and the variable light chain set forth in SEQ ID NO:1186 or a sequence of amino acids that exhibits at least 85% sequence identity to SEQ ID NO:1186;
oo) the variable heavy chain set forth in SEQ ID NO:1148 or a sequence of amino acids that exhibits at least 85% sequence identity to SEQ ID NO:1148, and the variable light chain set forth in SEQ ID NO:1186 or a sequence of amino acids that exhibits at least 85% sequence identity to SEQ ID NO:1186;
pp) the variable heavy chain set forth in SEQ ID NO:1149 or a sequence of amino acids that exhibits at least 85% sequence identity to SEQ ID NO:1149, and the variable light chain set forth in SEQ ID NO:1186 or a sequence of amino acids that exhibits at least 85% sequence identity to SEQ ID NO:1186;
qq) the variable heavy chain set forth in SEQ ID NO:1150 or a sequence of amino acids that exhibits at least 85% sequence identity to SEQ ID NO:1150, and the variable light chain set forth in SEQ ID NO:1158 or a sequence of amino acids that exhibits at least 85% sequence identity to SEQ ID NO:1158;
rr) the variable heavy chain set forth in SEQ ID NO:1152 or a sequence of amino acids that exhibits at least 85% sequence identity to SEQ ID NO:1152, and the variable light chain set forth in SEQ ID NO:1159 or a sequence of amino acids that exhibits at least 85% sequence identity to SEQ ID NO:1159;
ss) the variable heavy chain set forth in SEQ ID NO:1146 or a sequence of amino acids that exhibits at least 85% sequence identity to SEQ ID NO:1146, and the variable light chain set forth in SEQ ID NO:1159 or a sequence of amino acids that exhibits at least 85% sequence identity to SEQ ID NO:1159;
tt) the variable heavy chain set forth in SEQ ID NO:1146 or a sequence of amino acids that exhibits at least 85% sequence identity to SEQ ID NO:1146, and the variable light chain set forth in SEQ ID NO:1157 or a sequence of amino acids that exhibits at least 85% sequence identity to SEQ ID NO:1157;
uu) the variable heavy chain set forth in SEQ ID NO:1146 or a sequence of amino acids that exhibits at least 85% sequence identity to SEQ ID NO:1146, and the variable light chain set forth in SEQ ID NO:1186 or a sequence of amino acids that exhibits at least 85% sequence identity to SEQ ID NO:1186; and
vv) the variable heavy chain set forth in SEQ ID NO:1118 or a sequence of amino acids that exhibits at least 85% sequence identity to SEQ ID NO:1118, and the variable light chain set forth in SEQ ID NO:4 or 10 or a sequence of amino acids that exhibits at least 85% sequence identity to SEQ ID NO:4 or 10.

20. The anti-EGFR antibody, or antigen-binding fragment thereof, of claim 19, wherein sequence identity is at least 86%, 87%, 88%, 89%, 90%, 91%, 92%, 93%, 94%, 95%, 96%, 97%, 98%, 98%, 99% or more.

21. The anti-EGFR antibody, or antigen-binding fragment thereof, of claim 1 that is a modified anti-EGFR antibody or antigen-binding fragment thereof comprising an amino acid replacement(s) in a variable heavy chain, variable light chain or both of the unmodified antibody, wherein:
the unmodified anti-EGFR antibody is cetuximab, an antigen-binding fragment thereof or a variant thereof that does not comprise the amino acid replacement and specifically binds to EGFR.

22. A modified anti-EGFR antibody or antigen-binding fragment thereof, comprising an amino acid replacement(s) in a variable heavy chain, variable light chain or both of the unmodified antibody, wherein:
the unmodified anti-EGFR antibody is cetuximab, an antigen-binding fragment thereof or a variant thereof that does not comprise the amino acid replacement and specifically binds to EGFR;
the modified anti-EGFR antibody or fragment thereof exhibits a ratio of binding activity for EGFR at or about pH 6.0 to pH 6.5 compared to at or about pH 7.4 of at least 2.0, when measured under the same conditions except for the difference in pH; and
the modified anti-EGFR antibody exhibits less than 40% of the binding activity for EGFR at pH 7.4 compared to the unmodified antibody at pH 7.4 when measured under the same conditions, with the proviso that the modified anti-EGFR antibody or fragment thereof does not comprise:
a) a variable heavy chain comprising an amino acid replacement selected from among N31I, N31V, V50L, Y59E and T64N; or
b) a variable light chain comprising an amino acid replacement MC.

23. The modified anti-EGFR antibody or fragment thereof of claim 22, wherein the modified anti-EGFR antibody exhibits at least 20% of the binding activity for EGFR at or about pH 6.0 to pH 6.5 compared to the unmodified antibody at pH 6.0 to pH 6.5 when measured under the same conditions.

24. The modified anti-EGFR antibody or fragment thereof of claim 22, wherein:
a) the variable heavy chain, or portion thereof, contains an amino acid replacement corresponding to an amino acid replacement selected from among V24E, V24I, V24L, S25C, S25H, S25R, S25A, S25D, S25G, S25M, S25Q, S25V, S25L, S28C, L29H, N31H, G54D, G54S, F63R, F63C, F63M, F63P, F63S, T64V, L67G, D72L, D72P, D72W, N73Q, K75H, K75G, K75P, K75W, S76I, S76V, Q77E, T100P, Y104D, Y104S, Y104V, Q111I, Q111V, with reference to amino acid positions set forth in SEQ ID NO:3, wherein:
corresponding amino acid positions are identified by alignment of the VH chain of the antibody with the VH chain set forth in SEQ ID NO:3; and
the portion thereof is sufficient to form an antigen binding site and contains the amino acid replacement; and/or
b) the modified variable light chain, or portion thereof, contains an amino acid replacement corresponding to an amino acid replacement selected from among L4F, T5P, R24G, with reference to amino acid positions set forth in SEQ ID NO:4, wherein:
corresponding amino acid positions are identified by alignment of the VL chain of the antibody with the VL chain set forth in SEQ ID NO:4; and
the portion thereof is sufficient to form an antigen binding site and contains the amino acid replacement.

25. The modified anti-EGFR antibody of claim 22, wherein the variable heavy chain, or portion thereof, contains the amino acid replacement Y104D.

26. The modified anti-EGFR antibody of claim 25, wherein:
the variable heavy chain, or portion thereof, contains a further amino acid replacement selected from among V24E, S25C, S25V, F27R, T30F, S53G, D72L, R97H, and Q111P.

27. A modified anti-EGFR antibody or antigen-binding fragment thereof, comprising at least two amino acid replacements, wherein:
the amino acid replacements are in a variable heavy (VH) chain, variable light (VL) chain or both of the unmodified antibody:
the unmodified anti-EGFR antibody is cetuximab, an antigen-binding fragment thereof or a variant thereof that does not comprise the amino acid replacement and specifically binds to EGFR;
if there is one or more amino acid replacement(s) in the VH chain, the amino acid replacement(s) correspond(s) to one or more amino acid replacement(s) selected from among V24E, S25C, S25V, F27R, T30F, S53G, D72L, R97H, Y104D and Q111P, with reference to amino acid positions set forth in SEQ ID NO:3, wherein corresponding amino acid positions are identified by alignment of the VH chain of the antibody with the VH chain set forth in SEQ ID NO:3; and
if there is an amino acid replacement in the VL chain, the amino acid replacement in the VL chain corresponds to amino acid replacement I29S, with reference to the amino acid position set forth in SEQ ID NO:4; wherein corresponding amino acid positions are identified by alignment of the VL chain of the antibody with the VL chain set forth in SEQ ID NO:4.

28. The modified anti-EGFR antibody, or antigen-binding fragment thereof, of claim 27, wherein the amino acid replacements are HC-Y104D/HC-Q111P; HC-S25C/HC-Y104D; HC-Y104D/LC-I29S; HC-Y104D/HC-Q111P/LC-I29S; HC-S53G/HC-Y104D; HC-S53G/HC-Y104D/HC-Q111P; HC-S25V/HC-Y104D; HC-S25V/HC-Y104D/HC-Q111P; HC-S25V/HC-S53G/HC-Y104D; HC-S25V/HC-S53G/HC-Y104D/HC-Q111P; HC-T30F/HC-Y104D; HC-T30F/HC-Y104D/HC-Q111P; HC-T30F/HC-S53G/HC-Y104D; HC-T30F/HC-S53G/HC-Y104D/HC-Q111P; HC-D72L/HC-Y104D; HC-D72L/HC-Y104D/HC-Q111P; HC-S53G/HC-D72L/HC-Y104D; or HC-S53G/HC-D72L/HC-Y104D/HC-Q111P.

29. The modified anti-EGFR antibody, or antigen-binding fragment thereof, of claim 27, wherein the amino acid replacements are HC-S25C/HC-Q111P; HC-V24E/HC-F27R/HC-R97H/HC-Q111P; HC-S25C/LC-I29S; or HC-Q111P/LC-I29S.

30. The modified anti-EGFR antibody, or antigen-binding fragment thereof, of claim 27, wherein the modified anti-EGFR antibody or fragment thereof exhibits a ratio of binding activity for EGFR at or about pH 6.0 to pH 6.5 compared to at or about pH 7.4 of at least 1.1, 1.2, 1.3, 1.4, 1.5, 1.6, 1.7, 1.8, 1.9, 2.0, 2.5, 3.0, 4.0, 4.5, 5.0 or greater.

31. The modified anti-EGFR antibody, or antigen-binding fragment thereof, of claim 27, wherein the modified anti-EGFR antibody or fragment thereof exhibits a ratio of binding activity for EGFR at or about pH 6.0 to pH 6.5 compared to at or about pH 7.4 of at least 2.0.

32. The modified anti-EGFR antibody, or antigen-binding fragment thereof, of claim 31, wherein the amino acid replacements are HC-Y104D/HC-Q111P; HC-S25C/HC-Y104D; HC-S53G/HC-Y104D; HC-S53G/HC-Y104D/HC-Q111P; HC-S25V/HC-Y104D; HC-S25V/HC-Y104D/HC-Q111P; HC-S25V/HC-S53G/HC-Y104D; HC-S25V/HC-S53G/HC-Y104D/HC-Q111P; HC-T30F/HC-Y104D; HC-T30F/HC-Y104D/HC-Q111P; HC-T30F/HC-S53G/HC-Y104D; HC-T30F/HC-S53G/HC-Y104D/HC-Q111P; HC-D72L/HC-Y104D; HC-D72L/HC-Y104D/HC-Q111P; HC-S53G/HC-D72L/HC-Y104D; or HC-S53G/HC-D72L/HC-Y104D/HC-Q111P.

33. The modified anti-EGFR antibody, or antigen-binding fragment thereof, of claim 22, wherein the unmodified cetuximab antibody, antigen-binding fragment thereof or variant thereof comprises a variable heavy chain set forth in SEQ ID NO:3 and a variable light chain set forth in SEQ ID NO:4 or 10.

34. The modified anti-EGFR antibody, or antigen-binding fragment thereof, of claim 22, wherein the unmodified cetuximab antibody, antigen-binding fragment thereof or variant thereof comprises:
a heavy chain having a sequence of amino acids set forth in SEQ ID NO:1 or a sequence of amino acids that exhibits at least 85% sequence identity to the sequence of amino acids set forth in SEQ ID NO:1 and a light chain having a sequence of amino acids set forth SEQ ID NO:2 or a sequence of amino acids that exhibits at least 85% sequence identity to the sequence of amino acids set forth in SEQ ID NO:2; or
a heavy chain having a having a sequence of amino acids set forth in SEQ ID NO: 8 or a sequence of amino acids that exhibits at least 85% sequence identity to the sequence of amino acids set forth in SEQ ID NO:8 and a light chain having a sequence of amino acids set forth SEQ ID NO:9 or a sequence of amino acids that exhibits at least 85% sequence identity to the sequence of amino acids set forth in SEQ ID NO:9.

35. The modified anti-EGFR antibody, or antigen-binding fragment thereof, of claim 22, wherein the unmodified cetuximab is a variant that is humanized.

36. The modified anti-EGFR antibody, or antigen-binding fragment thereof, of claim 35, wherein the unmodified cetuximab comprises a variable heavy chain set forth in SEQ ID NO:28 and a variable light chain set forth in SEQ ID NO:29.

37. The modified anti-EGFR antibody, or antigen-binding fragment thereof, of claim 22, wherein the unmodified cetuximab, antigen-binding fragment thereof or variant thereof is an antigen-binding fragment thereof and the antigen-binding fragment is selected from among a Fab, Fab′, F(ab′)₂, single-chain Fv (scFv), Fv, dsFv, diabody, Fd and Fd′ fragments.

38. The modified anti-EGFR antibody, or antigen-binding fragment thereof, of claim 37, wherein the unmodified cetuximab is a Fab fragment comprising a heavy chain having a sequence of amino acids set forth in SEQ ID NO:5 or a sequence of amino acids that exhibits at least 75% sequence identity to SEQ ID NO:5 and a light chain having a sequence of amino acids set forth in SEQ ID NO:2 or a sequence of amino acids that exhibits at least 75% sequence identity to a sequence of amino acids set forth in SEQ ID NO:2.

39. The modified anti-EGFR antibody, or antigen-binding fragment thereof, of claim 22, comprising:
a) a variable heavy (VH) chain comprising the sequence of amino acids set forth in SEQ ID NO:495, 1062, 1112, 1114, 1115, 1116, 1117, 1118, 1119, 1124, 1125, 1126, 1127, 1128, 1129, 1130 or 1131, or a sequence of amino acids that exhibits at least 85% sequence identity to any of SEQ ID NOS: 495, 1062, 1112, 1114, 1115, 1116, 1117, 1118, 1119, 1124, 1125, 1126, 1127, 1128, 1129, 1130 or 1131; and
b) a variable light (VL) chain comprising the sequence of amino acids set forth in SEQ ID NO:4 or 10, or a sequence of amino acids that exhibits at least 85% sequence identity to SEQ ID NO:4 or 10.

40. The anti-EGFR antibody, or antigen-binding fragment thereof, of claim 22 that is humanized.

41. The anti-EGFR antibody, or antigen-binding fragment thereof, of claim 40, wherein:
the variable heavy chain exhibits less than 85% sequence identity to the variable heavy chain set forth in SEQ ID NO:3 and greater than 65% sequence identity to the variable heavy chain set forth in SEQ ID NO:3; and
the variable light chain exhibits less than 85% sequence identity to the variable light chain set forth in SEQ ID NO:4 and greater than 65% sequence identity to the variable light chain set forth in SEQ ID NO:4.

42. The anti-EGFR antibody, or antigen-binding fragment thereof, of claim 40, comprising a sequence of amino acids selected from among:
a) the variable heavy chain set forth in SEQ ID NO:1134 or a sequence of amino acids that exhibits at least 85% sequence identity to SEQ ID NO:1134, and the variable light chain set forth in SEQ ID NO:1138 or a sequence of amino acids that exhibits at least 85% sequence identity to SEQ ID NO:1138;
b) the variable heavy chain set forth in SEQ ID NO:1134 or a sequence of amino acids that exhibits at least 85% sequence identity to SEQ ID NO:1134, and the variable light chain set forth in SEQ ID NO:1139 or a sequence of amino acids that exhibits at least 85% sequence identity to SEQ ID NO:1139;
c) the variable heavy chain set forth in SEQ ID NO:1135 or a sequence of amino acids that exhibits at least 85% sequence identity to SEQ ID NO:1135, and the variable light chain set forth in SEQ ID NO:1138 or a sequence of amino acids that exhibits at least 85% sequence identity to SEQ ID NO:1138;
d) the variable heavy chain set forth in SEQ ID NO:1134 or a sequence of amino acids that exhibits at least 85% sequence identity to SEQ ID NO:1134, and the variable light chain set forth in SEQ ID NO:1140 or a sequence of amino acids that exhibits at least 85% sequence identity to SEQ ID NO:1140;
e) the variable heavy chain set forth in SEQ ID NO:1134 or a sequence of amino acids that exhibits at least 85% sequence identity to SEQ ID NO:1134, and the variable light chain set forth in SEQ ID NO:1141 or a sequence of amino acids that exhibits at least 85% sequence identity to SEQ ID NO:1141;
f) the variable heavy chain set forth in SEQ ID NO:1134 or a sequence of amino acids that exhibits at least 85% sequence identity to SEQ ID NO:1134, and the variable light chain set forth in SEQ ID NO:1142 or a sequence of amino acids that exhibits at least 85% sequence identity to SEQ ID NO:1142;
g) the variable heavy chain set forth in SEQ ID NO:1135 or a sequence of amino acids that exhibits at least 85% sequence identity to SEQ ID NO:1135, and the variable light chain set forth in SEQ ID NO:1142 or a sequence of amino acids that exhibits at least 85% sequence identity to SEQ ID NO:1142;
h) the variable heavy chain set forth in SEQ ID NO:1134 or a sequence of amino acids that exhibits at least 85% sequence identity to SEQ ID NO:1134, and the variable light chain set forth in SEQ ID NO:1143 or a sequence of amino acids that exhibits at least 85% sequence identity to SEQ ID NO:1143;
i) the variable heavy chain set forth in SEQ ID NO:1136 or a sequence of amino acids that exhibits at least 85% sequence identity to SEQ ID NO:1136, and the variable light chain set forth in SEQ ID NO:1142 or a sequence of amino acids that exhibits at least 85% sequence identity to SEQ ID NO:1142;
j) the variable heavy chain set forth in SEQ ID NO:1137 or a sequence of amino acids that exhibits at least 85% sequence identity to SEQ ID NO:1137, and the variable light chain set forth in SEQ ID NO:1144 or a sequence of amino acids that exhibits at least 85% sequence identity to SEQ ID NO:1144;
k) the variable heavy chain set forth in SEQ ID NO:1136 or a sequence of amino acids that exhibits at least 85% sequence identity to SEQ ID NO:1136, and the variable light chain set forth in SEQ ID NO:1144 or a sequence of amino acids that exhibits at least 85% sequence identity to SEQ ID NO:1144;
l) the variable heavy chain set forth in SEQ ID NO:1137 or a sequence of amino acids that exhibits at least 85% sequence identity to SEQ ID NO:1137, and the variable light chain set forth in SEQ ID NO:1145 or a sequence of amino acids that exhibits at least 85% sequence identity to SEQ ID NO:1145;
m) the variable heavy chain set forth in SEQ ID NO:1136 or a sequence of amino acids that exhibits at least 85% sequence identity to SEQ ID NO:1136, and the variable light chain set forth in SEQ ID NO:1145 or a sequence of amino acids that exhibits at least 85% sequence identity to SEQ ID NO:1145;
n) the variable heavy chain set forth in SEQ ID NO:1146 or a sequence of amino acids that exhibits at least 85% sequence identity to SEQ ID NO:1146, and the variable light chain set forth in SEQ ID NO:1153 or a sequence of amino acids that exhibits at least 85% sequence identity to SEQ ID NO:1153;
o) the variable heavy chain set forth in SEQ ID NO:1147 or a sequence of amino acids that exhibits at least 85% sequence identity to SEQ ID NO:1147, and the variable light chain set forth in SEQ ID NO:1153 or a sequence of amino acids that exhibits at least 85% sequence identity to SEQ ID NO:1153;
p) the variable heavy chain set forth in SEQ ID NO:1148 or a sequence of amino acids that exhibits at least 85% sequence identity to SEQ ID NO:1148, and the variable light chain set forth in SEQ ID NO:1154 or a sequence of amino acids that exhibits at least 85% sequence identity to SEQ ID NO:1154;
q) the variable heavy chain set forth in SEQ ID NO:1149 or a sequence of amino acids that exhibits at least 85% sequence identity to SEQ ID NO:1149, and the variable light chain set forth in SEQ ID NO:1154 or a sequence of amino acids that exhibits at least 85% sequence identity to SEQ ID NO:1154;
r) the variable heavy chain set forth in SEQ ID NO:1150 or a sequence of amino acids that exhibits at least 85% sequence identity to SEQ ID NO:1150, and the variable light chain set forth in SEQ ID NO:1155 or a sequence of amino acids that exhibits at least 85% sequence identity to SEQ ID NO:1155;
s) the variable heavy chain set forth in SEQ ID NO:1151 or a sequence of amino acids that exhibits at least 85% sequence identity to SEQ ID NO:1151, and the variable light chain set forth in SEQ ID NO:1156 or a sequence of amino acids that exhibits at least 85% sequence identity to SEQ ID NO:1156;
t) the variable heavy chain set forth in SEQ ID NO:1146 or a sequence of amino acids that exhibits at least 85% sequence identity to SEQ ID NO:1146, and the variable light chain set forth in SEQ ID NO:1156 or a sequence of amino acids that exhibits at least 85% sequence identity to SEQ ID NO:1156;
u) the variable heavy chain set forth in SEQ ID NO:1149 or a sequence of amino acids that exhibits at least 85% sequence identity to SEQ ID NO:1149, and the variable light chain set forth in SEQ ID NO:1156 or a sequence of amino acids that exhibits at least 85% sequence identity to SEQ ID NO:1156;
v) the variable heavy chain set forth in SEQ ID NO:1150 or a sequence of amino acids that exhibits at least 85% sequence identity to SEQ ID NO:1150, and the variable light chain set forth in SEQ ID NO:1157 or a sequence of amino acids that exhibits at least 85% sequence identity to SEQ ID NO:1157;
w) the variable heavy chain set forth in SEQ ID NO:1152 or a sequence of amino acids that exhibits at least 85% sequence identity to SEQ ID NO:1152, and the variable light chain set forth in SEQ ID NO:1157 or a sequence of amino acids that exhibits at least 85% sequence identity to SEQ ID NO:1157;
x) the variable heavy chain set forth in SEQ ID NO:1148 or a sequence of amino acids that exhibits at least 85% sequence identity to SEQ ID NO:1148, and the variable light chain set forth in SEQ ID NO:1157 or a sequence of amino acids that exhibits at least 85% sequence identity to SEQ ID NO:1157;
y) the variable heavy chain set forth in SEQ ID NO:1149 or a sequence of amino acids that exhibits at least 85% sequence identity to SEQ ID NO:1149, and the variable light chain set forth in SEQ ID NO:1157 or a sequence of amino acids that exhibits at least 85% sequence identity to SEQ ID NO:1157;
z) the variable heavy chain set forth in SEQ ID NO:1150 or a sequence of amino acids that exhibits at least 85% sequence identity to SEQ ID NO:1150, and the variable light chain set forth in SEQ ID NO:1186 or a sequence of amino acids that exhibits at least 85% sequence identity to SEQ ID NO:1186;
aa) the variable heavy chain set forth in SEQ ID NO:1152 or a sequence of amino acids that exhibits at least 85% sequence identity to SEQ ID NO:1152, and the variable light chain set forth in SEQ ID NO:1186 or a sequence of amino acids that exhibits at least 85% sequence identity to SEQ ID NO:1186;
bb) the variable heavy chain set forth in SEQ ID NO:1148 or a sequence of amino acids that exhibits at least 85% sequence identity to SEQ ID NO:1148, and the variable light chain set forth in SEQ ID NO:1186 or a sequence of amino acids that exhibits at least 85% sequence identity to SEQ ID NO:1186;
cc) the variable heavy chain set forth in SEQ ID NO:1149 or a sequence of amino acids that exhibits at least 85% sequence identity to SEQ ID NO:1149, and the variable light chain set forth in SEQ ID NO:1186 or a sequence of amino acids that exhibits at least 85% sequence identity to SEQ ID NO:1186;
dd) the variable heavy chain set forth in SEQ ID NO:1150 or a sequence of amino acids that exhibits at least 85% sequence identity to SEQ ID NO:1150, and the variable light chain set forth in SEQ ID NO:1158 or a sequence of amino acids that exhibits at least 85% sequence identity to SEQ ID NO:1158;
ee) the variable heavy chain set forth in SEQ ID NO:1152 or a sequence of amino acids that exhibits at least 85% sequence identity to SEQ ID NO:1152, and the variable light chain set forth in SEQ ID NO:1159 or a sequence of amino acids that exhibits at least 85% sequence identity to SEQ ID NO:1159;
ff) the variable heavy chain set forth in SEQ ID NO:1146 or a sequence of amino acids that exhibits at least 85% sequence identity to SEQ ID NO:1146, and the variable light chain set forth in SEQ ID NO:1159 or a sequence of amino acids that exhibits at least 85% sequence identity to SEQ ID NO:1159;
gg) the variable heavy chain set forth in SEQ ID NO:1146 or a sequence of amino acids that exhibits at least 85% sequence identity to SEQ ID NO:1146, and the variable light chain set forth in SEQ ID NO:1157 or a sequence of amino acids that exhibits at least 85% sequence identity to SEQ ID NO:1157; and
hh) the variable heavy chain set forth in SEQ ID NO:1146 or a sequence of amino acids that exhibits at least 85% sequence identity to SEQ ID NO:1146, and the variable light chain set forth in SEQ ID NO:1186 or a sequence of amino acids that exhibits at least 85% sequence identity to SEQ ID NO:1186.

43. The anti-EGFR antibody or antigen binding fragment of claim 1 that is a full-length antibody.

44. The anti-EGFR antibody or antigen binding fragment of claim 43, comprising:
a heavy chain constant region set forth in any of SEQ ID NOS:22-25, 1069 and 1070, or a variant thereof that exhibits at least 85% sequence identity thereto; and
a light chain constant region set forth in any of SEQ ID NOS: 1072-1073, or a variant thereof that exhibits at least 85% sequence identity thereto.

45. The anti-EGFR antibody or antigen binding fragment of claim 1 that is an antigen-binding fragment selected from among a Fab, Fab′, F(ab′)₂, single-chain Fv (scFv), Fv, dsFv, diabody, Fd and Fd′ fragments.

46. A conjugate, comprising an anti-EGFR antibody, or antigen-binding fragment thereof, of claim 1 linked directly or indirectly to a targeted agent.

47. The conjugate of claim 46, comprising the following components: (Ab), (L)_{q}, and (targeted agent)ₘ, wherein:
Ab is the anti-EGFR antibody or antigen-binding fragment thereof that binds to EGFR;
L is a linker for linking the Ab to the targeted agent;
m is at least 1;
q is 0 or more as long as the resulting conjugate binds to the EGFR;
the resulting conjugate binds to the EGFR.

48. The conjugate of claim 47, wherein m is 1 to 8 and q is 0 to 8.

49. The conjugate of claim 46, wherein the antibody and targeted agent are linked directly or indirectly via a linker.

50. The conjugate of claim 46, wherein the targeted agent is a protein, peptide, nucleic acid or small molecule.

51. The conjugate of claim 46, wherein the targeted agent is a therapeutic moiety.

52. The conjugate of claim 51; wherein the therapeutic moiety is a cytotoxic moiety, a radioisotope, a chemotherapeutic agent, a lytic peptide or a cytokine.

53. The conjugate of claim 51, wherein the therapeutic moiety is a maytansine derivative that is a maytansinoid selected from among ansamitocin or mertansine (DM1).

54. The conjugate of claim 51, wherein the therapeutic moiety is an auristatin or a functional peptide analog or derivative thereof that is monomethyl auristatin E (MMAE) or F (MMAF).

55. The conjugate of claim 51, wherein the therapeutic moiety is a toxin.

56. A nucleic acid molecule(s), comprising a sequence of nucleotides encoding an anti-EGFR antibody, or antigen-binding fragment thereof, of claim 1;

57. A nucleic acid molecule, comprising:
a sequence of nucleotides encoding the heavy chain of any of the anti-EGFR antibodies, or antigen-binding fragments thereof, of claim 1; and/or a sequence of nucleotides encoding the light chain of any of the anti-EGFR antibodies, or antigen-binding fragments thereof, of claim 1.

58. A vector, comprising the nucleic acid molecule(s) of claim 56.

59. A vector, comprising the nucleic acid molecule(s) of claim 57.

60. A cell, comprising the vector or vectors of claim 59.

61. The cell of claim 60, wherein the cell is a prokaryotic or eukaryotic cell.

62. A method of making an anti-EGFR antibody, or antigen-binding fragment thereof, comprising:
introducing a vector of claim 59 into a host;
expressing the encoded heavy chain and/or light chain; and
recovering the antibody.

63. A pharmaceutical composition comprising:
an anti-EGFR antibody or antigen-binding fragment of claim 1 in a pharmaceutically acceptable carrier or excipient.

64. The pharmaceutical composition of claim 63 that is formulated for systemic, parenteral, topical, oral, mucosal, intranasal, subcutaneous, aerosolized, intravenous, bronchial, pulmonary, vaginal, vulvovaginal, esophageal, or oroesophageal administration.

65. The pharmaceutical composition of claim 63 that is formulated for single dosage administration.

66. The pharmaceutical composition of claim 63 that is formulated for multiple dosage administration.

67. A method of treating a condition responsive to treatment with an anti-EGFR antibody in a subject, comprising administering to the subject a pharmaceutically effective amount of the pharmaceutical composition of claim 63.

68. The method of claim 67, wherein the condition responsive to treatment with an anti-EGFR antibody is a tumor, cancer or metastasis.

69. The method of claim 68, wherein the condition is a solid tumor.

70. The method of any of claim 68, wherein the condition responsive to treatment with an anti-EGFR antibody is head and neck cancer, non-small cell lung cancer or colorectal cancer.

71. The method of claim 68, wherein the subject comprises a tumor with a marker that confers resistance to anti-EGFR therapy, and the antibody or fragment thereof is effective against tumors with such markers.

72. The method of claim 71, wherein the marker is a mutation in KRAS, NRAS or BRAF.

73. The method of claim 67, wherein the subject is a human.

74. The method of claim 67, wherein the pharmaceutical composition is administered intranasally, intramuscularly, intradermally, intraperitoneally, intravenously, subcutaneously, orally, or by pulmonary administration.

75. The method of claim 67, further comprising administration of one or more other anticancer agents or treatments.
